(19) United States
(12) Patent Application Publication
(10) Pub. No.: US 2023/0302155 A1
(43) Pub. Date: Sep. 28, 2023

(54) COMPOSITIONS AND METHODS FOR IN VIVO GENERATION OF CAR EXPRESSING CELLS

(71) Applicant: Novartis AG, Basel (CH)

(72) Inventors: Sandeep Tharian Koshy, Cambridge, MA (US); Glenn Dranoff, Sudbury, MA (US); Maria Anna Sofia Broggi, Cambridge, MA (US); Chris Bridgeman, Bedford, MA (US); Stephen Michael Canham, Cambridge, MA (US); Yoel Melles, Cambridge, MA (US); Regis Cebe, Basel (CH); Brian Walter Granda, Salisbury, MA (US); Louise Mary Treanor, Cambridge, MA (US); Shyamali Jayashankar, Cambridge, MA (US); Jennifer Yang, Somerville, MA (US); Amy Rayo, Cambridge, MA (US); Andrew Patrick Price, Cambridge, MA (US); Darko Skegro, Riehen (CH); Justine Guyot, Zimmersheim (FR); Tushar Dattu Apsunde, Cambridge, MA (US); Cameron Chuck-munn Lee, Cambridge, MA (US); Michael Bardroff, Loerrach (DE); Sandra Miller, Munich (DE)

(21) Appl. No.: 18/022,058

(22) PCT Filed: Aug. 20, 2021
(86) PCT No.: PCT/US2021/046994

§ 371 Date: Feb. 17, 2023

Related U.S. Application Data
(60) Provisional application No. 63/154,609, filed on Feb. 26, 2021.
(60) Provisional application No. 63/068,876, filed on Aug. 21, 2020.

(51) Int. Cl. A61K 47/69; A61K 9/06; A61K 38/18; C12N 15/86; A61K 38/20; A61K 38/17; C07K 14/705; C07K 14/725; C07K 16/28; A61K 39/395; A61K 39/00; A61K 31/4745

(52) U.S. Cl. CPC A61K 47/6927; A61K 9/06; A61K 38/1858; C12N 15/86; A61K 38/2086; A61K 38/2046; A61K 47/6901; A61K 38/1774; C07K 14/70517; C07K 14/70578; A61K 38/177; C07K 14/70521; C07K 14/7051; C07K 16/2806; C07K 16/2818; C07K 16/2809; A61K 39/3955; A61K 39/4631; A61K 31/4745; C12N 2740/15043; C12N 2740/15071; A61K 2039/505; C07K 2319/33; C07K 2319/03; A61K 2239/21; C07K 2319/02; A61K 2239/22; C07K 2317/31; A61K 2239/29; C07K 2317/55; C07K 2317/622; C07K 2317/524; C07K 2317/526; C07K 2317/522; A61K 2039/545; A61K 2239/38; A61K 2239/13; C07K 2317/75

(57) ABSTRACT

Aspects of this disclosure relate generally to the use of biomaterials for the in vivo generation of CAR expressing cells. In some embodiments, the biomaterials comprise one or more of a cell recruitment composition, a viral vector, and/or a cell activation agent.

### RELATED APPLICATIONS

[0001] This application claims priority to U.S. Provisional Application 63/068,876 filed on Aug. 21, 2020, and U.S. Provisional Application 63/154,609 filed on Feb. 26, 2021, the entire contents of which are hereby incorporated by reference.

### SEQUENCE LISTING

[0002] The instant application contains a Sequence Listing which has been submitted electronically in ASCII format and is hereby incorporated by reference in its entirety. Said ASCII copy, created on Aug. 20, 2021, is named N2067-7176WO_SL.txt and is 987,095 bytes in size.

### FIELD OF THE INVENTION

[0003] Aspects of this disclosure relate generally to the use of biomaterials for the in vivo generation of CAR expressing cells. In some embodiments, the biomaterials is comprised in a composition that further comprises one or more of a cell recruitment composition, a viral vector, and/or a cell activation agent.

### BACKGROUND OF THE INVENTION

[0004] T cell adoptive transfer protocols show potential in a number of therapeutic applications, such as cancer, where CAR T cell therapies have recently been approved for the treatment of B cell malignancies. Current methodologies of CAR-T cell manufacture are performed ex vivo: extracting cells from a subject, engineering them to express a chimeric antigen receptor (CAR), and then reintroducing them into a subject for treatment of a disease, disorder, or condition, such as cancer. There remains a need in the art for efficient manufacturing of CAR expressing cells, including but not limited to, those which allow for site-specific delivery and/or in vivo production.

### SUMMARY OF THE INVENTION

[0005] In some aspects, the disclosure features is a first composition comprising a biomaterial and a cell recruitment factor; and a second composition comprising a viral vector. In some aspects, the disclosure features is a first composition comprising a biomaterial and a molecule (e.g., VEGF-C, IL-2, IL-7, IL-15 (e.g., hetIL-15 (IL15/sIL-15Ra)), GM-CSF, CXCL12, CXC3L1, CCL19, CCL21, CXCL10, or CXCL11); and a second composition comprising a viral vector.

[0006] In some aspects, the disclosure features a first composition comprising a biomaterial and a cell recruitment factor, wherein the biomaterial comprises a hydrogel, e.g., a cryogel, e.g., an alginate cryogel, and wherein the cell recruitment factor comprises an amino acid sequence according to SEQ ID NO: 741, or an amino acid sequence with at least 80%, 85%, 90%, 95%, or 99% sequence identity thereto, provided that the amino acid at position 26 of SEQ ID NO: 741 is not Cysteine (C), optionally wherein the amino acid at position 26 of SEQ ID NO: 741 is Alanine (A).

[0007] In some aspects, the disclosure features a second composition comprising a mesoporous silica particle; a viral vector; and a cell activation agent.

[0008] In some aspects, the disclosure features a method of transducing cells of a subject in vivo or treating a disease, disorder, or condition in a subject. The method comprises: administering a biomaterial and a cell recruitment factor to a site (e.g., high subcutaneous space or subcutaneous space adjacent to dermis) in the subject, and administering a viral vector or a nucleic acid comprising a transgene to the subject; thereby transducing cells of the subject with the transgene. In some aspects, the disclosure features a method of transducing cells of a subject in vivo or treating a disease, disorder, or condition in a subject. The method comprises: administering a biomaterial and a molecule (e.g., VEGF-C, IL-2, IL-7, IL-15 (e.g., hetIL-15 (IL15/sIL-15Ra)), GM-CSF, CXCL12, CXC3L1, CCL19, CCL21, CXCL10, or CXCL11) to a site (e.g., high subcutaneous space or subcutaneous space adjacent to dermis) in the subject, and administering a viral vector or a nucleic acid comprising a transgene to the subject; thereby transducing cells of the subject with the transgene.

[0009] In some embodiments, the biomaterial and the cell recruitment factor are comprised in a first composition, and the viral vector or nucleic acid is comprised in a second composition. In some embodiments, the biomaterial and the molecule (e.g., VEGF-C, IL-2, IL-7, IL-15 (e.g., hetIL-15 (IL15/sIL-15Ra)), GM-CSF, CXCL12, CXC3L1, CCL19, CCL21, CXCL10, or CXCL11) are comprised in a first composition, and the viral vector or nucleic acid is comprised in a second composition.

[0010] In some aspects, the disclosure features a method of transducing cells of a subject in vivo or treating a disease, disorder, or condition in a subject, the method comprising: administering a viral vector or a nucleic acid comprising a transgene to a site in the subject, wherein the subject has previously been administered a biomaterial and a cell recruitment factor in an amount sufficient to induce lymphangiogenesis and/or recruitment of T cells to the site in the subject; thereby transducing the cells. In some aspects, the disclosure features a method of transducing cells of a subject in vivo or treating a disease, disorder, or condition in a subject, the method comprising: administering a viral vector or a nucleic acid comprising a transgene to a site in the subject, wherein the subject has previously been administered a biomaterial and a molecule (e.g., VEGF-C, IL-2, IL-7, IL-15 (e.g., hetIL-15 (IL15/sIL-15Ra)), GM-CSF, CXCL12, CXC3L1, CCL19, CCL21, CXCL10, or CXCL11) in an amount sufficient to induce lymphangiogenesis and/or recruitment of T cells to the site in the subject; thereby transducing the cells.

[0011] In any of the aspects herein, e.g., the compositions and methods above, any of the embodiments herein (e.g., below) may apply.

[0012] In some embodiments, the biomaterial comprises (i) comprises a hydrogel; (ii) comprises a cryogel; (iii) comprises a gelatin, hyaluronic acid, collagen, alginate, laminin, chitosan, silk fibroin, agarose, poly(ethylene glycol), poly-vinyl alcohol, and/or hydroxyethyl methylacrylate; (iv) comprises alginate hydrogel, optionally wherein the alginate hydrogel further comprises norbornene and/or tetrazine, optionally wherein the norbornene and/or tetrazine is covalently associated with, e.g., chemically linked to, or non-covalently associated with, e.g., adsorbed on, the alginate; and/or (v) comprises pores between about 10 μm to about 300 μm, e.g., between about 50 μm to about 300 μm, in diameter, or no pores; and/or (vi) is chemically crosslinked. In some embodiments, the first composition comprising the biomaterial further comprises laponite, optionally wherein the laponite is present at a concentration of about 0.15 mg/mL to about 0.35 mg/mL, e.g., about 0.25 mg/mL. In some embodiments, the biomaterial further comprises laponite, optionally wherein the laponite is present at a concentration of about 0.15 mg/mL to about 0.35 mg/mL, e.g., about 0.25 mg/mL.

[0013] In some embodiments, the cell recruitment factor is: (i) noncovalently associated with, e.g., adsorbed on, the biomaterial; or (ii) covalently associated with, e.g., conjugated to, the biomaterial. In some embodiments, the cell recruitment factor: (i) induces lymphangiogenesis; (ii) induce growth of lymphatic endothelial cells; and/or (ii) recruits immune cells, optionally wherein the immune cells comprise T-cells and/or NK-cells.

[0014] In some embodiments, induction of lymphangiogenesis: (i) comprises an increase in the level of lymphatic endothelial cells (LECs) (e.g., CD45−CD31+PDPN+ cells), optionally wherein the level of LECs is increased by at least 10%, 20%, 30%, 40%, 50%, 60, 70%, 75%, 80%, 85%, 90%, 95%, 100%, or 2 00% as compared to a reference level (e.g., the level of LECs at a site in a subject prior to injection of the plurality of compositions or the first composition), when measured by an assay, e.g., a flow cytometry assay, e.g., as described in Example H or I; and/or (ii) results in at least 50 LECs (e.g., at least 75, 100, 125, 150, 200, 225, or 250 LECs) per milligram of tissue when measured by an assay, e.g., a flow cytometry assay, e.g., as described in Example H or I.

[0015] In some embodiments, the cell recruitment factor recruits T cells, optionally wherein the T cells comprise naive T cells (e.g., CD45RA+CD62L+ T cells or CD45RA+CD62L+CCR7+CD27+CD95+ T cells). In some embodiments, recruitment of T cells comprises an increase in the level of T cells, optionally wherein the level of T cells is increased by at least 10%, 20%, 30%, 40%, 50%, 60, 70%, 75%, 80%, 85%, 90%, 95% 100%, 200%, or 300% as compared to a reference level (e.g., the level of T cells at a site in a subject prior to injection of the plurality of compositions or the first composition), when measured by an assay, e.g., a flow cytometry assay, e.g., as described in Example H or I.

[0016] In some embodiments, the cell recruitment factor is chosen from VEGF-C, IL-2, IL-7, IL-15 (e.g., hetIL-15 (IL15/sIL-15Ra)), GM-CSF, CXCL12, CXC3L1, CCL19, CCL21, CXCL10, or CXCL11. In some embodiments, the cell recruitment factor comprises VEGF-C or a functional variant thereof; IL-15 (e.g., hetIL-15 (IL15/sIL-15Ra)) or a functional variant thereof, IL-7 or a functional variant thereof; or a combination thereof.

[0017] In some embodiments, the cell recruitment factor comprises VEGF-C, optionally wherein the VEGF-C: (i) comprises a mature VEGF-C peptide, optionally the minor or major mature form or a mutated variant thereof; (ii) is a monomer or dimer; and/or (iii) is present in an effective amount, optionally, in an amount of less than or about 1 mg, less than or about 10 mg, greater than or about 10 μg, greater than or about 1 μg, between about 1 μg and 1 mg, between about 10 μg and 1 mg, between about 1 μg and 10 mg, or between about 10 μg and 10 mg.

[0018] In some embodiments, the VEGF-C comprises: (i) an amino acid sequence of any one of the sequences provided in Table 18 or a sequence with at least 95% sequence identity thereto, optionally wherein the sequence comprises or does not comprise a linker (e.g., a glycine-serine linker) and/or a his tag; and/or (ii) the amino acid substitution of C137A, numbered according to SEQ ID NO: 725.

[0019] In some embodiments, the cell recruitment factor comprises: (i) an amino acid sequence according to SEQ ID NO: 741, or an amino acid sequence with at least 80%, 85%, 90%, 95%, or 99% sequence identity thereto, provided that the amino acid at position 26 of SEQ ID NO: 741 is not Cysteine (C), optionally wherein the amino acid at position 26 of SEQ ID NO: 741 is Alanine (A); (ii) the amino acid sequence according to SEQ ID NO: 743 or a sequence an amino acid sequence with at least 80%, 85%, 90%, 95%, or 99% sequence identity thereto; (iii) the amino acid sequence according to SEQ ID NO: 740 or an amino acid sequence with at least 80%, 85%, 90%, 95%, or 99% sequence identity thereto; (iv) the amino acid sequence according to SEQ ID NO: 736, or an amino acid sequence with at least 80%, 85%, 90%, 95%, or 99% sequence identity thereto; (v) a linker, e.g., wherein the linker has a sequence of Gly-Ser, wherein optionally the linker is C-terminal of SEQ ID NO: 743 or a sequence having at least 80%, 85%, 90%, 95%, or 99% sequence identity thereto; (vi) the amino acid sequence according to SEQ ID NO: 735, or an amino acid sequence with at least 80%, 85%, 90%, 95%, or 99% sequence identity thereto; (vii) the amino acid sequence according to SEQ ID NO: 734, or an amino acid sequence with at least 80%, 85%, 90%, 95%, or 99% sequence identity thereto; and/or (viii) the amino acid sequence according to SEQ ID NO: 733, or an amino acid sequence with at least 80%, 85%, 90%, 95%, or 99% sequence identity thereto.

[0020] In some embodiments, any of the compositions, e.g., any of the first compositions, described herein further comprises IL-15 (e.g., hetIL-15 (IL15/sIL-15Ra)) or a functional variant thereof In some embodiments, any of the compositions, e.g., any of the first compositions, described herein further comprises IL-7 or a functional variant thereof In some embodiments, any of the compositions, e.g., any of the first compositions, described herein further comprises IL-15 (e.g., hetIL-15 (IL15/sIL-15Ra)) or a functional variant thereof and IL-7 or a functional variant thereof.

[0021] In some embodiments, any of the methods described herein further comprises administration of IL-15 (e.g., hetIL-15 (IL15/sIL-15Ra)) or a functional variant thereof. In some embodiments, any of the methods described herein further comprises administration of IL-7 or a functional variant thereof. In some embodiments, any of the methods described herein further comprises administration IL-15 (e.g., hetIL-15 (IL15/sIL-15Ra)) and a functional variant thereof or IL-7 or a functional variant thereof.

[0022] In some embodiments, the second composition further comprises a particle. In some embodiments, the particle is a mesoporous particle, a silica particle and/or a mesoporous silica particle, optionally wherein the mesoporous silica particle is a mesoporous silica rod. In some embodiments, the mesoporous silica particle comprises a surface modification, optionally wherein the surface modification comprises: (a) a —OH (hydroxyl), amine, carboxylic acid, phosphonate, halide, azide, alkyne, epoxide, sulfhydryl, polyethyleneimine, a hydrophobic moiety, or salts thereof, optionally using a C1 to C20 alkyl or (O(CH2 CH2)1-25 linker; (b) a primary, secondary, tertiary, or quaternary amine; and/or (c) a polyethyleneimine having an average molecular weight of about 1000 to 20,000 Da, about 1,200 to 15,000 Da, about 1,500 to 12,000 Da, about 2,000 Da, about 3,000 Da, about 4,000 Da, about 5,000 Da, about 6,000 Da, about 7,000 Da, about 8,000 Da, about 9,000 Da, or about 10,000 Da, as measured by gel permeation chromatography (GPC). In some embodiments, the mesoporous silica particle (i) is a trimethylammonium functionalized mesoporous silica particle, e.g., a N,N,N-trimethylpropan-1-ammonium functionalized mesoporous silica particle; (iii) comprises a plurality of pores, optionally wherein the pores are between 2-50 nm in diameter; and/or (iv) comprises a surface area of at least about 100 m2/g.

[0023] In some embodiments, (i) the viral vector is noncovalently, e.g., electrostatically, or covalently associated with the mesoporous silica particle; and/or (ii) the cell activation agent is noncovalently or covalently associated with the mesoporous silica particle. In some embodiments, the viral vector comprises: (i) a lentivirus, retrovirus, adenovirus, adeno-associated virus, or herpes virus; and/or (ii) an expression vector comprising a recombinant polynucleotide comprising an expression control sequence operatively linked to a nucleotide sequence to be expressed. In some embodiments, the nucleotide sequence encodes: a chimeric antigen receptor (CAR), an engineered TCR, a cytokine, a chemokine, an shRNA, or a polypeptide engineered to target a tumor antigen.

[0024] In some embodiments, the tumor antigen is selected from the group consisting of: TSHR, CD19, CD123, CD22, CD30, CD171, CS-1, CLL-1, CD33, EGFRvIII, GD2, GD3, BCMA, Tn Ag, PSMA, ROR1, FLT3, FAP, TAG72, CD38, CD44v6, CEA, EPCAM, B7H3, KIT, IL-13Ra2, Mesothelin, IL-11Ra, PSCA, PRSS21, VEGFR2, LewisY, CD24, PDGFR-beta, SSEA-4, CD20, Folate receptor alpha, ERBB2 (Her2/neu), MUC1, EGFR, NCAM, Prostase, PAP, ELF2M, Ephrin B2, IGF-I receptor, CAIX, LMP2, gp100, bcr-abl, tyrosinase, EphA2, Fucosyl GM1, sLe, GM3, TGS5, HMWMAA, o-acetyl-GD2, Folate receptor beta, TEM1/CD248, TEM7R, CLDN6, GPRC5D, CXORF61, CD97, CD179a, ALK, Polysialic acid, PLAC1, GloboH, NY-BR-1, UPK2, HAVCR1, ADRB3, PANX3, GPR20, LY6K, OR51E2, TARP, WT1, NY-ESO-1, LAGE-1a, MAGE-A1, legumain, HPV E6, E7, MAGE A1, ETV6-AML, sperm protein 17, XAGE1, Tie 2, MAD-CT-1, MAD-CT-2, Fos-related antigen 1, p53, p53 mutant, prostein, survivin and telomerase, PCTA-1/Galectin 8, MelanA/MART1, Ras mutant, hTERT, sarcoma translocation breakpoints, ML-IAP, ERG (TMPRSS2 ETS fusion gene), NA17, PAX3, Androgen receptor, Cyclin B1, MYCN, RhoC, TRP-2, CYP1B1, BORIS, SART3, PAX5, OY-TES1, LCK, AKAP-4, SSX2, RAGE-1, human telomerase reverse transcriptase, RU1, RU2, intestinal carboxyl esterase, mut hsp70-2, CD79a, CD79b, CD72, LAIR1, FCAR, LILRA2, CD300LF, CLEC12A, BST2, EMR2, LY75, GPC3, FCRL5, IGLL1, and any combination thereof.

[0025] In some embodiments, the viral vector encodes a CAR that comprises an antigen binding domain, a transmembrane domain, a costimulatory signaling region, and a signaling domain, wherein: (i) the antigen binding domain binds an antigen selected from the group consisting of CD19, CD123, CD22, CD20, EGFRvIII, BCMA, Mesothelin, CD33, CLL-1, and any combination thereof; (ii) the transmembrane domain comprises a CD8 hinge; (iii) the costimulatory signaling region is selected from a 4-1BB or CD28 costimulatory signaling domain; and/or (iv) the signaling domain comprises a CD3 zeta signaling domain.

[0026] In some embodiments, the second composition further comprises a cell activation agent. In some embodiments, the cell activation agent comprises an agent that stimulates CD3/TCR complex and/or an agent that stimulates a costimulatory molecule and/or growth factor receptor. In some embodiments, the cell activation agent comprises a multispecific binding molecule comprising: (A) an anti-CD3 binding domain, and (B) a costimulatory molecule binding domain (e.g., an anti-CD2 binding domain or an anti-CD28 binding domain).

[0027] In some embodiments, the anti-CD3 binding domain, e.g., an anti-CD3 scFv, is situated N-terminal of the costimulatory molecule binding domain, e.g., an anti-CD2 Fab or an anti-CD28 Fab; or the anti-CD3 binding domain, e.g., an anti-CD3 scFv, is situated C-terminal of the costimulatory molecule binding domain, e.g., an anti-CD2 Fab or an anti-CD28 Fab, optionally wherein: an Fc region is situated between the anti-CD3 binding domain and the costimulatory molecule binding domain; or the multispecific binding molecule comprises a CH2, and the anti-CD3 binding domain is situated N-terminal of the CH2.

[0028] In some embodiments of the second compositions and methods herein, the multispecific binding molecule comprises: (i) a first polypeptide comprising from N-terminal to C-terminal: VH of the anti-CD3 binding domain, VL of the anti-CD3 binding domain, VH of the costimulatory molecule binding domain, CH1, CH2, and CH3; and (ii) a second polypeptide comprising from N-terminal to C-terminal: VL of the costimulatory molecule binding domain and CL. In some embodiments, the multispecific binding molecule comprises: (i) a first polypeptide comprising from N-terminal to C-terminal: VH of the costimulatory molecule binding domain, CH1, CH2, CH3, VH of the anti-CD3 binding domain, and VL of the anti-CD3 binding domain; and (ii) a second polypeptide comprising from N-terminal to C-terminal: VL of the costimulatory molecule binding domain and CL. In some embodiments, the multispecific binding molecule comprises: (i) a first polypeptide comprising from N-terminal to C-terminal: VH of the costimulatory molecule binding domain, CH1, VH of the anti-CD3 binding domain, VL of the anti-CD3 binding domain, CH2, and CH3; and (ii) a second polypeptide comprising from N-terminal to C-terminal: VL of the costimulatory molecule binding domain and CL. In some embodiments, the anti-CD3 binding domain comprises an scFv and the costimulatory molecule binding domain is part of a Fab fragment.

[0029] In some embodiments, the cell activation agent comprises the amino acid sequence of any heavy chain provided in Table 20, or an amino acid sequence with at least 95% sequence identity thereto; and/or the amino acid sequence of any light chain provided in Table 20, or an amino acid sequence with at least 95% sequence identity thereto. In some embodiments, the cell activation agent is conjugated to or adsorbed on the particle, e.g., mesoporous silica particle.

[0030] In some embodiments, the multispecific binding molecule comprises an Fc region comprising: (i) a L234A, L235A, S267K, and P329A mutation (LALASKPA), numbered according to the Eu numbering system; (ii) a L234A, L235A, and P329G mutation (LALAPG), numbered according to the Eu numbering system; (iii) a G237A, D265A, P329A, and S267K mutation (GADAPASK), numbered according to the Eu numbering system; (iv) a L234A, L235A, and G237A mutation (LALAGA), numbered according to the Eu numbering system; (v) a D265A, P329A, and S267K mutation (DAPASK), numbered according to the Eu numbering system; (vi) a G237A, D265A, and P329A mutation (GADAPA), numbered according to the Eu numbering system; (vii) a L234A, L235A, and P329A mutation (LALAPA), numbered according to the Eu numbering system; or (viii) an amino acid sequence of any of the Fc regions in Table 20 or an amino acid sequence having at least 95% identity thereto.

[0031] In some embodiments, the multispecific binding molecule comprises: (i) a heavy chain comprising the amino acid sequence of any of SEQ ID NOs: 726, 1416, 893, 1417, or 895, or an amino acid sequence having at least 95% sequence identity thereto; and/or (ii) a light chain comprising the amino acid sequence of any of SEQ ID NOs: 728, 730, 892, or 894, or an amino acid sequence having at least 95% sequence identity thereto. In some embodiments, the multispecific binding molecule comprises: (i) a heavy chain comprising the amino acid sequence of SEQ ID NO: 726 or an amino acid sequence having at least 95% sequence identity thereto, and a light chain comprising the amino acid sequence of SEQ ID NO: 728, or an amino acid sequence having at least 95% sequence identity thereto; (ii) a heavy chain comprising the amino acid sequence of SEQ ID NO: 726 or an amino acid sequence having at least 95% sequence identity thereto, and a light chain comprising the amino acid sequence of SEQ ID NO: 730, or an amino acid sequence having at least 95% sequence identity thereto; (iii) a heavy chain comprising the amino acid sequence of SEQ ID NO: 1416 or an amino acid sequence having at least 95% sequence identity thereto, and a light chain comprising the amino acid sequence of SEQ ID NO: 728, or an amino acid sequence having at least 95% sequence identity thereto; (iv) a heavy chain comprising the amino acid sequence of SEQ ID NO: 1416 or an amino acid sequence having at least 95% sequence identity thereto, and a light chain comprising the amino acid sequence of SEQ ID NO: 730, or an amino acid sequence having at least 95% sequence identity thereto; (v) a heavy chain comprising the amino acid sequence of SEQ ID NO: 893 or an amino acid sequence having at least 95% sequence identity thereto, and a light chain comprising the amino acid sequence of SEQ ID NO: 892, or an amino acid sequence having at least 95% sequence identity thereto; (vi) a heavy chain comprising the amino acid sequence of SEQ ID NO: 1417 or an amino acid sequence having at least 95% sequence identity thereto, and a light chain comprising the amino acid sequence of SEQ ID NO: 892, or an amino acid sequence having at least 95% sequence identity thereto; or (vii) a heavy chain comprising the amino acid sequence of SEQ ID NO: 895 or an amino acid sequence having at least 95% sequence identity thereto, and a light chain comprising the amino acid sequence of SEQ ID NO: 894, or an amino acid sequence having at least 95% sequence identity thereto.

[0032] In some embodiments, the second composition further comprises a first population of particles and a second population of particles, e.g., a first population of mesoporous silica particles and a second population of mesoporous silica particles, wherein the first population comprises the viral vector and the second population comprises a cell activation agent, e.g., wherein the viral vector is noncovalently associated with a particle of the first population and the cell activation agent is noncovalently associated with a particle of the second population.

[0033] In some embodiments, the composition, e.g., the first or second composition, is suitable for injectable use.

[0034] In some embodiments, the composition, e.g., the first or second composition, described herein further comprises a Tet2 inhibitor and/or a ZBTB32 inhibitor. In some embodiments, the Tet2 inhibitor comprises: (1) a gene editing system targeted to one or more sites within the gene encoding Tet2, or its corresponding regulatory elements; (2) a nucleic acid (e.g., an siRNA or shRNA) that inhibits expression of Tet2; (3) a protein (e.g., a dominant negative, e.g., catalytically inactive) Tet2, or a binding partner of Tet2 (e.g., a dominant negative binding partner of Tet2); (4) a small molecule that inhibits expression and/or function of Tet2; (5) a nucleic acid encoding any of (1)-(3); or (6) any combination of (1)-(5). In some embodiments, the ZBTB32 gene or one or more components thereof, (2) a nucleic acid encoding one or more components of the gene editing system; or (3) a combination of (1) and (2). In an embodiment, the ZBTB32 inhibitor comprises: (1) a gene editing system targeting the ZBTB32 gene or one or more components thereof. In an embodiment, the ZBTB32 inhibitor comprises (2) a nucleic acid encoding one or more components of the gene editing system. In an embodiment, the ZBTB32 inhibitor comprises a combination of (1) and (2).

[0035] In some embodiments, the methods described herein further comprise administering to the subject: (i) a Tet2 inhibitor, optionally wherein the Tet2 inhibitor comprises: (1) a gene editing system targeted to one or more sites within the gene encoding Tet2, or its corresponding regulatory elements; (2) a nucleic acid (e.g., an siRNA or shRNA) that inhibits expression of Tet2; (3) a protein (e.g., a dominant negative, e.g., catalytically inactive) Tet2, or a binding partner of Tet2 (e.g., a dominant negative binding partner of Tet2); (4) a small molecule that inhibits expression and/or function of Tet2; (5) a nucleic acid encoding any of (1)-(3); or (6) any combination of (1)-(5); and/or (ii) a ZBTB32 inhibitor, optionally wherein the ZBTB32 inhibitor comprises: (1) a gene editing system targeting the ZBTB32 gene or one or more components thereof, (2) a nucleic acid encoding one or more components of the gene editing system; or (3) a combination of (1) and (2). In an embodiment, the ZBTB32 inhibitor comprises: (1) a gene editing system targeting the ZBTB32 gene or one or more components thereof. In an embodiment, the ZBTB32 inhibitor comprises (2) a nucleic acid encoding one or more components of the gene editing system. In an embodiment, the ZBTB32 inhibitor comprises a combination of (1) and (2) In some embodiments, the first composition is administered prior to the administration of the second composition, optionally wherein: (i) the first composition is administered about 1-4 weeks, e.g., about 2 weeks, prior to the administration of the second composition; or (ii) the first composition is administered at least two weeks prior to the administration of the second composition.

[0036] In some embodiments, any of the methods described herein further comprises evaluating, e.g., measuring, lymphangiogenesis in a sample from the subject (e.g., a sample from or close to the site of administration), wherein lymphangiogenesis is measured after the administration of the first composition and/or prior to the administration of the second composition, optionally wherein measuring lymphangiogenesis comprises acquiring a value for the level and/or activity of lymphatic endothelial cells (LECs) (e.g., CD45−CD31+PDPN+ cells) in the sample.

[0037] In some embodiments, any of the methods described herein further comprises evaluating, e.g., measuring, the recruitment of T cells in a sample from the subject (e.g., a sample from or close to the site of administration), wherein the recruitment of T cells is measured after the administration of the first composition and/or prior to the administration of the second composition, optionally wherein measuring the recruitment of T cells comprises acquiring a value for the level and/or activity of T cells (e.g., naïve T cells, e.g., CD45RA+CD62L+ T cells and/or CD45RA+CD62L+CCR7+CD27+CD95+ T cells) in the sample.

[0038] In some embodiments, the subject has or has been diagnosed with having a disease, disorder, or condition; and/or the subject is a human.

[0039] In some embodiments, the disease, disorder, or condition comprises: (i) a cancer; (ii) a hematological cancer, optionally wherein the hematological cancer comprises a leukemia or lymphoma; (iii) a hematological cancer chosen from chronic lymphocytic leukemia (CLL), mantle cell lymphoma (MCL), multiple myeloma, acute lymphoid leukemia (ALL), Hodgkin lymphoma, B-cell acute lymphoid leukemia (BALL), T-cell acute lymphoid leukemia (TALL), small lymphocytic leukemia (SLL), B cell prolymphocytic leukemia, blastic plasmacytoid dendritic cell neoplasm, Burkitt [symbol] lymphoma, diffuse large B cell lymphoma (DLBCL), DLBCL associated with chronic inflammation, chronic myeloid leukemia, myeloproliferative neoplasms, follicular lymphoma, pediatric follicular lymphoma, hairy cell leukemia, small cell- or a large cell-follicular lymphoma, malignant lymphoproliferative conditions, MALT lymphoma (extranodal marginal zone lymphoma of mucosa-associated lymphoid tissue), Marginal zone lymphoma, myelodysplasia, myelodysplastic syndrome, non-Hodgkin lymphoma, plasmablastic lymphoma, plasmacytoid dendritic cell neoplasm, Waldenstrom macroglobulinemia, splenic marginal zone lymphoma, splenic lymphoma/leukemia, splenic diffuse red pulp small B-cell lymphoma, hairy cell leukemia-variant, lymphoplasmacytic lymphoma, a heavy chain disease, plasma cell myeloma, solitary plasmocytoma of bone, extraosseous plasmocytoma, nodal marginal zone lymphoma, pediatric nodal marginal zone lymphoma, primary cutaneous follicle center lymphoma, lymphomatoid granulomatosis, primary mediastinal (thymic) large B-cell lymphoma, intravascular large B-cell lymphoma, ALK+ large B-cell lymphoma, large B-cell lymphoma arising in HHV8-associated multicentric Castleman disease, primary effusion lymphoma, B-cell lymphoma, acute myeloid leukemia (AML), or unclassifiable lymphoma; (iv) a solid cancer; (v) a solid cancer chosen from: one or more of mesothelioma, malignant pleural mesothelioma, non-small cell lung cancer, small cell lung cancer, squamous cell lung cancer, large cell lung cancer, pancreatic cancer, pancreatic ductal adenocarcinoma, esophageal adenocarcinoma, breast cancer, glioblastoma, ovarian cancer, colorectal cancer, prostate cancer, cervical cancer, skin cancer, melanoma, renal cancer, liver cancer, brain cancer, thymoma, sarcoma, carcinoma, uterine cancer, kidney cancer, gastrointestinal cancer, urothelial cancer, pharynx cancer, head and neck cancer, rectal cancer, esophagus cancer, or bladder cancer, or a metastasis thereof, or (iv) an autoimmune disease, an inflammatory disease, or a transplant. In some embodiments, the disease, disorder, or condition is an autoimmune disease, an inflammatory disease, or a transplant and the CAR expressed binds to a B cell antigen, e.g., CD 19, CD20, CD22, CD123, FcRn5, FcRn2, BCMA, CS-1 and CD138.

[0040] In some embodiments, the disease, disorder, or condition comprises a solid tumor. In some embodiments, when treating a solid tumor with a CAR-expressing cell manufactured using the methods described herein, the cell expresses two CARs, the first CAR binds to a B cell antigen and the second CAR binds to a solid tumor antigen. In some embodiments, when treating a solid tumor with a CAR-expressing cell manufactured using the methods described herein, the cell expresses a multispecific CAR that comprises a first binding domain that binds to a B cell antigen and a second binding domain that binds to a solid tumor antigen. Without wishing to be bound by theory, expressing a CAR that binds to a B cell antigen in such cells may help improve the proliferation and/or survival of the CAR-expressing cells. B cell antigens (e.g., CD19 on normal B cells) may improve the proliferation and/or survival of such CAR-expressing cells even when the level of the tumor antigen is low (e.g., when the number of tumor cells is low, or before the CAR-expressing cells manufactured using the methods described herein encounter solid tumor cells).

[0041] In some embodiments, the disease, disorder, or condition comprises a myeloid tumor. In some embodiments, when treating a myeloid tumor with a CAR-expressing cell manufactured using the methods described herein, the cell expresses two CARs, the first CAR binds to a B cell antigen and the second CAR binds to a myeloid tumor antigen. In some embodiments, when treating a myeloid tumor with a CAR-expressing cell manufactured using the methods described herein, the cell expresses a multispecific CAR that comprises a first binding domain that binds to a B cell antigen and a second binding domain that binds to a myeloid tumor antigen. Without wishing to be bound by theory, expressing a CAR that binds to a B cell antigen in such cells may help improve the proliferation and/or survival of the CAR-expressing cells. B cell antigens (e.g., CD19 on normal B cells) may improve the proliferation and/or survival of such CAR-expressing cells even when the level of the tumor antigen is low (e.g., when the number of tumor cells is low, or before the CAR-expressing cells manufactured using the methods described herein encounter myeloid tumor cells).

[0042] In some embodiments of the methods or second compositions described herein, the viral vector or the nucleic acid encodes:
[0043] (i) a first CAR that binds to a B cell antigen (e.g., CD19) and a second CAR that binds to (a) a solid tumor antigen (e.g., EGFRvIII), (b) a myeloid tumor antigen, or (c) an antigen of a hematological tumor not of B-cell lineage; or
[0044] (2) a CAR that comprises a first binding domain that binds to a B cell antigen (e.g., CD19) and a second binding domain that binds to (a) a solid tumor antigen (e.g., EGFRvIII), (b) a myeloid tumor antigen, or (c) an antigen of a hematological tumor not of B-cell lineage.

[0045] In some embodiments, the B cell antigen is CD5, CD10, CD19, CD20, CD21, CD22, CD23, CD24, CD25, CD27, CD30, CD34, CD37, CD38, CD40, CD53, CD69, CD72, CD73, CD74, CD75, CD77, CD79a, CD79b, CD80, CD81, CD82, CD83, CD84, CD85, CD86, CD123, CD135, CD138, CD179, CD269, Flt3, ROR1, BCMA, FcRn5, FcRn2, CS-1, CXCR4, 5, 7, IL-7/3R, 1L7/4/3R, or IL4R. In some embodiments, the B cell antigen is CD19, CD20, CD22, CD123, FcRn5, FcRn2, BCMA, CS-1 or CD138.

[0046] In some embodiments, the solid tumor antigen is EGFRvIII, mesothelin, GD2, Tn Ag, PSMA, TAG72, CD44v6, CEA, EPCAM, KIT, IL-13Ra2, leguman, GD3, CD171, IL-11Ra, PSCA, MAD-CT-1, MAD-CT-2, VEGFR2, LewisY, CD24, PDGFR-beta, SSEA-4, folate receptor alpha, ERBBs (e.g., ERBB2), Her2/neu, MUC1, EGFR, NCAM, Ephrin B2, CAIX, LMP2, sLe, HMWMAA, o-acetyl-GD2, folate receptor beta, TEM1/CD248, TEM7R, FAP, Legumain, HPV E6 or E7, ML-IAP, CLDN6, TSHR, GPRC5D, ALK, Polysialic acid, Fos-related antigen, neutrophil elastase, TRP-2, CYP1B1, sperm protein 17, beta human chorionic gonadotropin, AFP, thyroglobulin, PLAC1, globoH, RAGE1, MN-CA IX, human telomerase reverse transcriptase, intestinal carboxyl esterase, mut hsp 70-2, NA-17, NY-BR-1, UPK2, HAVCR1, ADRB3, PANX3, GPR20, Ly6k, OR51E2, TARP, GFRa4, or a peptide of any of these antigens presented on MHC.

[0047] In some embodiments, also contemplated herein is a kit comprising a first composition described herein and a second composition described herein.

[0048] In some aspects, the disclosure features a method of treating a disease, disorder, or condition in a subject, the method comprising: administering a viral vector or a nucleic acid comprising a transgene to a site in the subject that has been induced to undergo lymphangiogenesis at the site, thereby transducing the cells.

[0049] In some aspects, the disclosure features a method of preparing a subject to receive a viral vector encoding a chimeric antigen receptor (CAR), comprising administering to the subject a biomaterial and a cell recruitment factor, thereby preparing the subject to receive the viral vector encoding the CAR. In some aspects, the disclosure features a method of preparing a subject to receive a viral vector encoding a chimeric antigen receptor (CAR), comprising administering to the subject a biomaterial and a molecule (e.g., VEGF-C, IL-2, IL-7, IL-15 (e.g., hetIL-15 (IL15/sIL-15Ra)), GM-CSF, CXCL12, CXC3L1, CCL19, CCL21, CXCL10, or CXCL11), thereby preparing the subject to receive the viral vector encoding the CAR.

[0050] In some embodiments, preparing comprises induction of lymphangiogenesis and/or recruitment of T cells (e.g., e.g., CD45RA+CD62L+ T cells and/or CD45RA+CD62L+CCR7+CD27+CD95+ T cells). In some embodiments, the method further comprises administering the viral vector encoding the CAR, optionally wherein the viral vector is conjugated to a particle (e.g., a mesoporous silica particle that comprises or does not comprise a cell activation agent).

[0051] Also contemplated herein is a composition, comprising a biomaterial comprising a cell recruitment factor; a first population of mesoporous silica particles; a viral vector; and, optionally, a cell activation agent. Also contemplated herein is a composition, comprising a biomaterial and a cell recruitment factor; a first population of mesoporous silica particles; a viral vector; and, optionally, a cell activation agent.

[0052] In some embodiments, the biomaterial comprises a hydrogel, optionally a cryogel. In some embodiments, the cryogel comprises gelatin, hyaluronic acid, collagen, alginate, laminin, chitosan, silk fibroin, agarose, poly(ethylene glycol), poly-vinyl alcohol, and/or hydroxyethyl methylacrylate. In some embodiments, the composition comprising the cryogel further comprises laponite. In some embodiments, the cryogel comprises pores between about 10 to 300 μm in diameter, optionally between about 50 to 300 μm. In some embodiments, the cryogel is chemically cross-linked.

[0053] In some embodiments, the cell recruitment factor selectively recruits immune cells, optionally T-cells and/or NK-cells. In some embodiments, the cell recruitment factor is selected from the group consisting of CCL19, CXCL9, CXCL10, XCL1, IL-2, IL-7, CCL21, GM-CSF, CCL17, CCL22, CCL20, CCL27, IL-15, lymphotoxin alpha, lymphotoxin beta, VEGF-C, FLT3L, G-CSF, PDGF, S100A8/A9, CSF-1, CXCL8, CCL20, CCL17, CCR5, CCR6, CCL2, VEGF, Angiopoietin-2, PGE2, LTB4, CXC3L1, CCL19, CCL21, CXCL10, CXCL11, and/or CXCL12. In some embodiments, the VEGF-C is selected from the group consisting of immature VEGF-C peptide or mature VEGF-C peptide. In some embodiments, the mature VEGF-C peptide is the minor mature form or major mature form. In some embodiments, the mature VEGF-C peptide is a wild type minor mature form or a wild type major mature form. In some embodiments, the mature VEGF-C peptide is a modified minor mature form or a modified major mature form. In some embodiments, the mature VEGF-C peptide is a modified minor mature form comprising a mutation at Cysteine 137 (e.g., C137A) or a modified major mature form comprising a mutation at Cysteine 137 (e.g., C137A). In some embodiments, the mature VEGF-C peptide is a modified minor mature form comprising a C137A mutation or a modified major mature form comprising a C137A mutation. In some embodiments, the mature VEGF-C peptide is present as a dimer or monomer. In some embodiments, the VEGF-C is a dimer of the major mature form further comprising a C137A mutation in each monomer. In some embodiments, the VEGF-C is a dimer of the minor mature form further comprising a C137A mutation in each monomer. In some embodiments, the VEGF-C is selected from a sequence provided in Table 18, optionally, wherein the his tag is not included in the sequence. In some embodiments, the VEGF-C is present in an effective amount, optionally in an amount of less than or about 1 mg, less than or about 10 mg, greater than or about 10 μg, greater than or about 1 μg, between about 1 μg and 1 mg, between about 10 μg and 1 mg, between about 1 μg and 10 mg, or between about 10 μg and 10 mg.

[0054] In some embodiments, the first population of mesoporous silica particles are surface modified. In some embodiments, the surface modification on the first population of mesoporous silica particles is —OH (hydroxyl), amine, carboxylic acid, phosphonate, halide, azide, alkyne, epoxide, sulfhydryl, polyethyleneimine, a hydrophobic moiety, or salts thereof, optionally using a C₁ to C₂₀ alkyl or (—O(CH2-CH₂—)₁₋₂₅ linker. In some embodiments, the surface modification on the first population of mesoporous silica particles is a primary, secondary, tertiary, or quaternary amine. In some embodiments, the surface modification on the first population of mesoporous silica particles is a polyethyleneimine having an average molecular weight of about 1000 to 20,000 Da, about 1,200 to 15,000 Da, about 1,500 to 12,000 Da, about 2,000 Da, about 3,000 Da, about 4,000 Da, about 5,000 Da, about 6,000 Da, about 7,000 Da, about 8,000 Da, about 9,000 Da, or about 10,000 Da, as measured by gel permeation chromatography (GPC). In some embodiments, mesoporous silica particles comprise pores of between 2-50 nm in diameter. In some embodiments, the mesoporous silica particles have a surface area of at least about 100 m²/g. In some embodiments, the composition is suitable for injectable use. In some embodiments, the mesoporous silica particles are in the form of mesoporous silica rods.

[0055] In some embodiments, the viral vector is conjugated to first population of the mesoporous silica particles. In some embodiments, the viral vector is electrostatically or covalently conjugated to the first population of mesoporous silica particles. In some embodiments, the viral vector is a retrovirus, adenovirus, adeno-associated virus, herpes virus, or lentivirus. In some embodiments, the viral vector comprises an expression vector comprising a recombinant polynucleotide comprising an expression control sequence operatively linked to a nucleotide sequence to be expressed. In some embodiments, the nucleotide sequence encodes a chimeric antigen receptor (CAR), an engineered TCR, one or more cytokines, one or more chemokines, an shRNA to block an inhibitory molecule, or wherein the nucleotide sequence comprises an mRNA to induce expression of a protein. In some embodiments, the nucleotide sequence encodes a polypeptide engineered to target a tumor antigen. In some embodiments, the polypeptide targets a tumor antigen selected from the group consisting of: TSHR, CD19, CD123, CD22, CD30, CD171, CS-1, CLL-1, CD33, EGFRvIII, GD2, GD3, BCMA, Tn Ag, PSMA, ROR1, FLT3, FAP, TAG72, CD38, CD44v6, CEA, EPCAM, B7H3, KIT, IL-13Ra2, Mesothelin, IL-11Ra, PSCA, PRSS21, VEGFR2, LewisY, CD24, PDGFR-beta, SSEA-4, CD20, Folate receptor alpha, ERBB2 (Her2/neu), MUC1, EGFR, NCAM, Prostase, PAP, ELF2M, Ephrin B2, IGF-I receptor, CAIX, LMP2, gp100, bcr-abl, tyrosinase, EphA2, Fucosyl GM1, sLe, GM3, TGS5, HMWMAA, o-acetyl-GD2, Folate receptor beta, TEM1/CD248, TEM7R, CLDN6, GPRC5D, CXORF61, CD97, CD179a, ALK, Polysialic acid, PLAC1, GloboH, NY-BR-1, UPK2, HAVCR1, ADRB3, PANX3, GPR20, LY6K, OR51E2, TARP, WT1, NY-ESO-1, LAGE-1a, MAGE-A1, legumain, HPV E6, E7, MAGE A1, ETV6-AML, sperm protein 17, XAGE1, Tie 2, MAD-CT-1, MAD-CT-2, Fos-related antigen 1, p53, p53 mutant, prostein, survivin and telomerase, PCTA-1/Galectin 8, MelanA/MART1, Ras mutant, hTERT, sarcoma translocation breakpoints, ML-IAP, ERG (TMPRSS2 ETS fusion gene), NA17, PAX3, Androgen receptor, Cyclin B1, MYCN, RhoC, TRP-2, CYP1B1, BORIS, SART3, PAX5, OY-TES1, LCK, AKAP-4, SSX2, RAGE-1, human telomerase reverse transcriptase, RU1, RU2, intestinal carboxyl esterase, mut hsp70-2, CD79a, CD79b, CD72, LAIR1, FCAR, LILRA2, CD300LF, CLEC12A, BST2, EMR2, LY75, GPC3, FCRL5, IGLL1, and any combination thereof. In some embodiments, the protein is a CAR that comprises an antigen binding domain, a transmembrane domain, a costimulatory signaling region, and a signaling domain. In some embodiments, the signaling domain is a CD3 zeta signaling domain. In some embodiments, the costimulatory signaling region is selected from 41BB (i.e., CD137), CD27, ICOS, and/or CD28.

[0056] In some embodiments, the cell activation agent is conjugated to or absorbed on the first population of mesoporous silica particles or a second population of mesoporous silica particles. In some embodiments, the cell activation agent is a T cell stimulating compound, an anti-idiotype antibody to a CAR antigen binding domain, and/or a tumor antigen. In some embodiments, the T-cell stimulating compound is IL-2, IL-15, anti-CD2 mAb, anti-CD3 mAb, anti-CD28 mAb, neo-antigen peptides, peptides from shared antigens such as TRP2, gp100, tumor cell lysate, CD19, CD20, CD22, ROR1, mesothelin, CD33/IL3Ra, c-Met, PSMA, Glycolipid F77, EGFRvIII, GD-2, NY-ESO-1 TCR, and/or MAGE A3 TCR. In some embodiments, the cell activation agent comprises a CD3/TCR complex and/or an agent that stimulates a costimulatory molecule and/or growth factor receptor, optionally, wherein the cell activation agent is a multispecific binding molecule comprising an agent that stimulates a CD3/TCR complex and an agent that stimulates a costimulatory molecule and/or growth factor receptor. In some embodiments, the cell activation is selected from a sequence provided in Table 20. In some embodiments, the cell activation agent is conjugated to the second population of mesoporous silica particles or to a lipid envelope on the surface of the second population of mesoporous silica particles. In some embodiments, the composition further comprises a cytokine. In some embodiments, the cytokine is conjugated to or adsorbed on the first or second population of mesoporous silica particles. In some embodiments, the cytokine is IL-1, IL-2, IL-4, IL-5, IL-7, IL-10, IL-12, IL-15, IL-17, IL-21, or transforming growth factor beta (TGF-β), or an agonist thereof, a mimetic thereof, a variant thereof, a functional fragment thereof, or a combination thereof.

[0057] Also contemplated herein is a method of transducing cells in vivo comprising administering a biomaterial comprising a cell recruitment factor; a first population of mesoporous silica particles; a viral vector; and, optionally, a cell activation agent to a subject. In some embodiments, the components are administered simultaneously or sequentially. In some embodiments, the biomaterial comprising the cell recruitment factor is administered first. In some embodiments, the first population of mesoporous silica rods, the viral vector, and, optionally, the cell activation agent is administered simultaneously and, optionally, after the biomaterial.

[0058] Also contemplated herein is a method of transducing cells in vivo comprising administering a biomaterial and a cell recruitment factor; a first population of mesoporous silica particles; a viral vector; and, optionally, a cell activation agent to a subject. In some embodiments, the components are administered simultaneously or sequentially. In some embodiments, the biomaterial and the cell recruitment factor are administered first. In some embodiments, the first population of mesoporous silica rods, the viral vector, and, optionally, the cell activation agent is administered simultaneously and, optionally, after the biomaterial and the cell recruitment factor.

[0059] Also contemplated herein is a method of transducing cells in vivo comprising administering a biomaterial and a molecule (e.g., VEGF-C, IL-2, IL-7, IL-15 (e.g., hetIL-15 (IL15/sIL-15Ra)), GM-CSF, CXCL12, CXC3L1, CCL19, CCL21, CXCL10, or CXCL11); a first population of mesoporous silica particles; a viral vector; and, optionally, a cell activation agent to a subject. In some embodiments, the components are administered simultaneously or sequentially. In some embodiments, the biomaterial and the molecule are administered first. In some embodiments, the first population of mesoporous silica rods, the viral vector, and, optionally, the cell activation agent is administered simultaneously and, optionally, after the biomaterial and the molecule.

[0060] In some embodiments, the biomaterial comprises a hydrogel, optionally a cryogel. In some embodiments, the cryogel comprises gelatin, hyaluronic acid, collagen, alginate, laminin, chitosan, silk fibroin, agarose, poly(ethylene glycol), poly-vinyl alcohol, and/or hydroxyethyl methylacrylate. In some embodiments, the composition comprising the cryogel further comprises laponite. In some embodiments, the cryogel comprises pores between about 10 to 300 μm in diameter, optionally between about 50 to 300 μm. In some embodiments, the cryogel is chemically cross-linked.

[0061] In some embodiments, the cell recruitment factor selectively recruits immune cells, optionally T-cells and/or NK-cells. In some embodiments, the cell recruitment factor is selected from the group consisting of CCL19, CXCL9, CXCL10, XCL1, IL-2, IL-7, CCL21, GM-CSF, CCL17, CCL22, CCL20, CCL27, IL-15, lymphotoxin alpha, lymphotoxin beta, VEGF-C, FLT3L, G-CSF, PDGF, S100A8/A9, CSF-1, CXCL8, CCL20, CCL17, CCR5, CCR6, CCL2, VEGF, Angiopoietin-2, PGE2, LTB4, CXC3L1, CCL19, CCL21, CXCL10, CXCL11, and/or CXCL12. In some embodiments, the VEGF-C is selected from the group consisting of immature VEGF-C peptide or mature VEGF-C peptide. In some embodiments, the mature VEGF-C peptide is the minor mature form or major mature form. In some embodiments, the mature VEGF-C peptide is a wild type minor mature form or a wild type major mature form. In some embodiments, the mature VEGF-C peptide is a modified minor mature form or a modified major mature form. In some embodiments, the mature VEGF-C peptide is a modified minor mature form comprising a mutation at Cysteine 137 (e.g., C137A) or a modified major mature form comprising a mutation at Cysteine 137 (e.g., C137A). In some embodiments, the mature VEGF-C peptide is a modified minor mature form comprising a C137A mutation or a modified major mature form comprising a C137A mutation. In some embodiments, the mature VEGF-C peptide is present as a dimer or monomer. In some embodiments, the VEGF-C is a dimer of the major mature form further comprising a C137A mutation in each monomer. In some embodiments, the VEGF-C is a dimer of the minor mature form further comprising a C137A mutation in each monomer. In some embodiments, the VEGF-C is selected from Table 18, optionally, wherein the his tag is not included in the sequence. In some embodiments, the VEGF-C is present in an effective amount, optionally in an amount of less than or about 1 mg, less than or about 10 mg, greater than or about 10 μg, greater than or about 1 μg, between about 1 μg and 1 mg, between about 10 μg and 1 mg, between about 1 μg and 10 mg, or between about 10 μg and 10 mg.

[0062] In some embodiments, the first population of mesoporous silica particles are surface modified. In some embodiments, the surface modification on the first population of mesoporous silica particles is —OH (hydroxyl), amine, carboxylic acid, phosphonate, halide, azide, alkyne, epoxide, sulfhydryl, polyethyleneimine, a hydrophobic moiety, or salts thereof, optionally using a C₁ to C₂₀ alkyl or (—O(CH2-CH₂—)₁₋₂₅ linker. In some embodiments, the surface modification on the first population of mesoporous silica particles is a primary, secondary, tertiary, or quaternary amine. In some embodiments, the surface modification on the first population of mesoporous silica particles is a polyethyleneimine having an average molecular weight of about 1000 to 20,000 Da, about 1,200 to 15,000 Da, about 1,500 to 12,000 Da, about 2,000 Da, about 3,000 Da, about 4,000 Da, about 5,000 Da, about 6,000 Da, about 7,000 Da, about 8,000 Da, about 9,000 Da, or about 10,000 Da, as measured by gel permeation chromatography (GPC). In some embodiments, mesoporous silica particles comprise pores of between 2-50 nm in diameter. In some embodiments, the mesoporous silica particles have a surface area of at least about 100 m²/g. In some embodiments, the composition is suitable for injectable use. In some embodiments, the mesoporous silica particles are in the form of mesoporous silica rods.

[0063] In some embodiments, the viral vector is conjugated to first population of the mesoporous silica particles. In some embodiments, the viral vector is electrostatically or covalently conjugated to the first population of mesoporous silica particles. In some embodiments, the viral vector is a retrovirus, adenovirus, adeno-associated virus, herpes virus, or lentivirus. In some embodiments, the viral vector comprises an expression vector comprising a recombinant polynucleotide comprising an expression control sequence operatively linked to a nucleotide sequence to be expressed. In some embodiments, the nucleotide sequence encodes a chimeric antigen receptor (CAR), an engineered TCR, one or more cytokines, one or more chemokines, an shRNA to block an inhibitory molecule, or wherein the nucleotide sequence comprises an mRNA to induce expression of a protein. In some embodiments, the nucleotide sequence encodes a polypeptide engineered to target a tumor antigen. In some embodiments, the polypeptide targets a tumor antigen selected from the group consisting of: TSHR, CD19, CD123, CD22, CD30, CD171, CS-1, CLL-1, CD33, EGFRvIII, GD2, GD3, BCMA, Tn Ag, PSMA, ROR1, FLT3, FAP, TAG72, CD38, CD44v6, CEA, EPCAM, B7H3, KIT, IL-13Ra2, Mesothelin, IL-11Ra, PSCA, PRSS21, VEGFR2, LewisY, CD24, PDGFR-beta, SSEA-4, CD20, Folate receptor alpha, ERBB2 (Her2/neu), MUC1, EGFR, NCAM, Prostase, PAP, ELF2M, Ephrin B2, IGF-I receptor, CAIX, LMP2, gp100, bcr-abl, tyrosinase, EphA2, Fucosyl GM1, sLe, GM3, TGS5, HMWMAA, o-acetyl-GD2, Folate receptor beta, TEM1/CD248, TEM7R, CLDN6, GPRC5D, CXORF61, CD97, CD179a, ALK, Polysialic acid, PLAC1, GloboH, NY-BR-1, UPK2, HAVCR1, ADRB3, PANX3, GPR20, LY6K, OR51E2, TARP, WT1, NY-ESO-1, LAGE-1a, MAGE-A1, legumain, HPV E6, E7, MAGE A1, ETV6-AML, sperm protein 17, XAGE1, Tie 2, MAD-CT-1, MAD-CT-2, Fos-related antigen 1, p53, p53 mutant, prostein, survivin and telomerase, PCTA-1/Galectin 8, MelanA/MART1, Ras mutant, hTERT, sarcoma translocation breakpoints, ML-IAP, ERG (TMPRSS2 ETS fusion gene), NA17, PAX3, Androgen receptor, Cyclin B1, MYCN, RhoC, TRP-2, CYP1B1, BORIS, SART3, PAX5, OY-TES1, LCK, AKAP-4, SSX2, RAGE-1, human telomerase reverse transcriptase, RU1, RU2, intestinal carboxyl esterase, mut hsp70-2, CD79a, CD79b, CD72, LAIR1, FCAR, LILRA2, CD300LF, CLEC12A, BST2, EMR2, LY75, GPC3, FCRL5, IGLL1, and any combination thereof. In some embodiments, the protein is a CAR that comprises an antigen binding domain, a transmembrane domain, a costimulatory signaling region, and a signaling domain. In some embodiments, the signaling domain is a CD3 zeta signaling domain. In some embodiments, the costimulatory signaling region is selected from 41BB (i.e., CD137), CD27, ICOS, and/or CD28.

[0064] In some embodiments, the cell activation agent is conjugated to or absorbed on the first population of mesoporous silica particles or a second population of mesoporous silica particles. In some embodiments, the cell activation agent is a T cell stimulating compound, an anti-idiotype antibody to a CAR antigen binding domain, and/or a tumor antigen. In some embodiments, the T-cell stimulating compound is IL-2, IL-15, anti-CD2 mAb, anti-CD3 mAb, anti-CD28 mAb, neo-antigen peptides, peptides from shared antigens such as TRP2, gp100, tumor cell lysate, CD19, CD20, CD22, ROR1, mesothelin, CD33/IL3Ra, c-Met, PSMA, Glycolipid F77, EGFRvIII, GD-2, NY-ESO-1 TCR, and/or MAGE A3 TCR. In some embodiments, the cell activation agent comprises a CD3/TCR complex and/or an agent that stimulates a costimulatory molecule and/or growth factor receptor, optionally, wherein the cell activation agent is a multispecific binding molecule comprising an agent that stimulates a CD3/TCR complex and an agent that stimulates a costimulatory molecule and/or growth factor receptor. In some embodiments, the cell activation is selected from a sequence provided in Table 20. In some embodiments, the cell activation agent is conjugated to the second population of mesoporous silica particles or to a lipid envelope on the surface of the second population of mesoporous silica particles. In some embodiments, the composition further comprises a cytokine. In some embodiments, the cytokine is conjugated to or adsorbed on the first or second population of mesoporous silica particles. In some embodiments, the cytokine is IL-1, IL-2, IL-4, IL-5, IL-7, IL-10, IL-12, IL-15, IL-17, IL-21, or transforming growth factor beta (TGF-β), or an agonist thereof, a mimetic thereof, a variant thereof, a functional fragment thereof, or a combination thereof.

[0065] Also contemplated herein is a method of treating a subject having a disease, disorder, or condition comprising administering a biomaterial comprising a cell recruitment factor; a first population of mesoporous silica particles; a viral vector; and, optionally, a cell activation agent to a subject. In some embodiments, the components are administered simultaneously or sequentially. In some embodiments, the biomaterial comprising the cell recruitment factor is administered first. In some embodiments, the first population of mesoporous silica rods, the viral vector, and, optionally, the cell activation agent is administered simultaneously and, optionally, after the biomaterial.

[0066] Also contemplated herein is a method of treating a subject having a disease, disorder, or condition comprising administering a biomaterial and a cell recruitment factor; a first population of mesoporous silica particles; a viral vector; and, optionally, a cell activation agent to a subject. In some embodiments, the components are administered simultaneously or sequentially. In some embodiments, the biomaterial and the cell recruitment factor are administered first. In some embodiments, the first population of mesoporous silica rods, the viral vector, and, optionally, the cell activation agent is administered simultaneously and, optionally, after the biomaterial and the cell recruitment factor.

[0067] Also contemplated herein is a method of treating a subject having a disease, disorder, or condition comprising administering a biomaterial and a molecule (e.g., VEGF-C, IL-2, IL-7, IL-15 (e.g., hetIL-15 (IL15/sIL-15Ra)), GM-CSF, CXCL12, CXC3L1, CCL19, CCL21, CXCL10, or CXCL11); a first population of mesoporous silica particles; a viral vector; and, optionally, a cell activation agent to a subject. In some embodiments, the components are administered simultaneously or sequentially. In some embodiments, the biomaterial and the molecule are administered first. In some embodiments, the first population of mesoporous silica rods, the viral vector, and, optionally, the cell activation agent is administered simultaneously and, optionally, after the biomaterial and the molecule.

[0068] In some embodiments, the subject has cancer. In some embodiments, the subject has cancer expressing one or more tumor antigen selected from the group consisting of: TSHR, CD19, CD123, CD22, CD30, CD171, CS-1, CLL-1, CD33, EGFRvIII, GD2, GD3, BCMA, Tn Ag, PSMA, ROR1, FLT3, FAP, TAG72, CD38, CD44v6, CEA, EPCAM, B7H3, KIT, IL-13Ra2, Mesothelin, IL-11Ra, PSCA, PRSS21, VEGFR2, LewisY, CD24, PDGFR-beta, SSEA-4, CD20, Folate receptor alpha, ERBB2 (Her2/neu), MUC1, EGFR, NCAM, Prostase, PAP, ELF2M, Ephrin B2, IGF-I receptor, CAIX, LMP2, gp100, ber-abl, tyrosinase, EphA2, Fucosyl GM1, sLe, GM3, TGS5, HMWMAA, o-acetyl-GD2, Folate receptor beta, TEM1/CD248, TEM7R, CLDN6, GPRC5D, CXORF61, CD97, CD179a, ALK, Polysialic acid, PLAC1, GloboH, NY-BR-1, UPK2, HAVCR1, ADRB3, PANX3, GPR20, LY6K, OR51E2, TARP, WT1, NY-ESO-1, LAGE-1a, MAGE-A1, legumain, HPV E6, E7, MAGE A1, ETV6-AML, sperm protein 17, XAGE1, Tie 2, MAD-CT-1, MAD-CT-2, Fos-related antigen 1, p53, p53 mutant, prostein, survivin and telomerase, PCTA-1/Galectin 8, MelanA/MART1, Ras mutant, hTERT, sarcoma translocation breakpoints, ML-IAP, ERG (TMPRSS2 ETS fusion gene), NA17, PAX3, Androgen receptor, Cyclin B1, MYCN, RhoC, TRP-2, CYP1B1, BORIS, SART3, PAX5, OY-TES1, LCK, AKAP-4, SSX2, RAGE-1, human telomerase reverse transcriptase, RU1, RU2, intestinal carboxyl esterase, mut hsp70-2, CD79a, CD79b, CD72, LAIR1, FCAR, LILRA2, CD300LF, CLEC12A, BST2, EMR2, LY75, GPC3, FCRL5, IGLL1, and any combination thereof.

[0069] In some embodiments, the biomaterial comprises a hydrogel, optionally a cryogel. In some embodiments, the cryogel comprises gelatin, hyaluronic acid, collagen, alginate, laminin, chitosan, silk fibroin, agarose, poly(ethylene glycol), poly-vinyl alcohol, and/or hydroxyethyl methylacrylate. In some embodiments, the composition comprising the cryogel further comprises laponite. In some embodiments, the cryogel comprises pores between about 10 to 300 μm in diameter, optionally between about 50 to 300 μm. In some embodiments, the cryogel is chemically cross-linked.

[0070] In some embodiments, the cell recruitment factor selectively recruits immune cells, optionally T-cells and/or NK-cells. In some embodiments, the cell recruitment factor is selected from the group consisting of CCL19, CXCL9, CXCL10, XCL1, IL-2, IL-7, CCL21, GM-CSF, CCL17, CCL22, CCL20, CCL27, IL-15, lymphotoxin alpha, lymphotoxin beta, VEGF-C, FLT3L, G-CSF, PDGF, S100A8/A9, CSF-1, CXCL8, CCL20, CCL17, CCR5, CCR6, CCL2, VEGF, Angiopoietin-2, PGE2, LTB4, CXC3L1, CCL19, CCL21, CXCL10, CXCL11, and/or CXCL12. In some embodiments, the VEGF-C is selected from the group consisting of immature VEGF-C propeptide or mature VEGF-C peptide. In some embodiments, the mature VEGF-C peptide is the minor mature form or major mature form. In some embodiments, the mature VEGF-C peptide is a wild type minor mature form or a wild type major mature form. In some embodiments, the mature VEGF-C peptide is a modified minor mature form or a modified major mature form. In some embodiments, the mature VEGF-C peptide is a modified minor mature form comprising a mutation at Cysteine 137 (e.g., C137A) or a modified major mature form comprising a mutation at Cysteine 137 (e.g., C137A). In some embodiments, the mature VEGF-C peptide is a modified minor mature form comprising a C137A mutation or a modified major mature form comprising a C137A mutation. In some embodiments, the mature VEGF-C peptide is present as a dimer or monomer. In some embodiments, the VEGF-C is a dimer of the major mature form further comprising a C137A mutation in each monomer. In some embodiments, the VEGF-C is a dimer of the minor mature form further comprising a C137A mutation in each monomer. In some embodiments, the VEGF-C is selected from Table 18, optionally, wherein the his tag is not included in the sequence. In some embodiments, the VEGF-C is present in an effective amount, optionally in an amount of less than or about 1 mg, less than or about 10 mg, greater than or about 10 μg, greater than or about 1 μg, between about 1 μg and 1 mg, between about 10 μg and 1 mg, between about 1 μg and 10 mg, or between about 10 μg and 10 mg.

[0071] In some embodiments, the first population of mesoporous silica particles are surface modified. In some embodiments, the surface modification on the first population of mesoporous silica particles is —OH (hydroxyl), amine, carboxylic acid, phosphonate, halide, azide, alkyne, epoxide, sulfhydryl, polyethyleneimine, a hydrophobic moiety, or salts thereof, optionally using a C₁ to C₂₀ alkyl or (—O(CH2-CH₂—)₁₋₂₅ linker. In some embodiments, the surface modification on the first population of mesoporous silica particles is a primary, secondary, tertiary, or quaternary amine. In some embodiments, the surface modification on the first population of mesoporous silica particles is a polyethyleneimine having an average molecular weight of about 1000 to 20,000 Da, about 1,200 to 15,000 Da, about 1,500 to 12,000 Da, about 2,000 Da, about 3,000 Da, about 4,000 Da, about 5,000 Da, about 6,000 Da, about 7,000 Da, about 8,000 Da, about 9,000 Da, or about 10,000 Da, as measured by gel permeation chromatography (GPC). In some embodiments, mesoporous silica particles comprise pores of between 2-50 nm in diameter. In some embodiments, the mesoporous silica particles have a surface area of at least about 100 m²/g. In some embodiments, the composition is suitable for injectable use. In some embodiments, the mesoporous silica particles are in the form of mesoporous silica rods.

[0072] In some embodiments, the viral vector is conjugated to first population of the mesoporous silica particles. In some embodiments, the viral vector is electrostatically or covalently conjugated to the first population of mesoporous silica particles. In some embodiments, the viral vector is a retrovirus, adenovirus, adeno-associated virus, herpes virus, or lentivirus. In some embodiments, the viral vector comprises an expression vector comprising a recombinant polynucleotide comprising an expression control sequence operatively linked to a nucleotide sequence to be expressed. In some embodiments, the nucleotide sequence encodes a chimeric antigen receptor (CAR), an engineered TCR, one or more cytokines, one or more chemokines, an shRNA to block an inhibitory molecule, or wherein the nucleotide sequence comprises an mRNA to induce expression of a protein. In some embodiments, the nucleotide sequence encodes a polypeptide engineered to target a tumor antigen. In some embodiments, the polypeptide targets a tumor antigen selected from the group consisting of: TSHR, CD19, CD123, CD22, CD30, CD171, CS-1, CLL-1, CD33, EGFRvIII, GD2, GD3, BCMA, Tn Ag, PSMA, ROR1, FLT3, FAP, TAG72, CD38, CD44v6, CEA, EPCAM, B7H3, KIT, IL-13Ra2, Mesothelin, IL-11Ra, PSCA, PRSS21, VEGFR2, LewisY, CD24, PDGFR-beta, SSEA-4, CD20, Folate receptor alpha, ERBB2 (Her2/neu), MUC1, EGFR, NCAM, Prostase, PAP, ELF2M, Ephrin B2, IGF-I receptor, CAIX, LMP2, gp100, bcr-abl, tyrosinase, EphA2, Fucosyl GM1, sLe, GM3, TGS5, HMWMAA, o-acetyl-GD2, Folate receptor beta, TEM1/CD248, TEM7R, CLDN6, GPRC5D, CXORF61, CD97, CD179a, ALK, Polysialic acid, PLAC1, GloboH, NY-BR-1, UPK2, HAVCR1, ADRB3, PANX3, GPR20, LY6K, OR51E2, TARP, WT1, NY-ESO-1, LAGE-1a, MAGE-A1, legumain, HPV E6, E7, MAGE A1, ETV6-AML, sperm protein 17, XAGE1, Tie 2, MAD-CT-1, MAD-CT-2, Fos-related antigen 1, p53, p53 mutant, prostein, survivin and telomerase, PCTA-1/Galectin 8, MelanA/MART1, Ras mutant, hTERT, sarcoma translocation breakpoints, ML-IAP, ERG (TMPRSS2 ETS fusion gene), NA17, PAX3, Androgen receptor, Cyclin B1, MYCN, RhoC, TRP-2, CYP1B1, BORIS, SART3, PAX5, OY-TES1, LCK, AKAP-4, SSX2, RAGE-1, human telomerase reverse transcriptase, RU1, RU2, intestinal carboxyl esterase, mut hsp70-2, CD79a, CD79b, CD72, LAIR1, FCAR, LILRA2, CD300LF, CLEC12A, BST2, EMR2, LY75, GPC3, FCRL5, IGLL1, and any combination thereof. In some embodiments, the protein is a CAR that comprises an antigen binding domain, a transmembrane domain, a costimulatory signaling region, and a signaling domain. In some embodiments, the signaling domain is a CD3 zeta signaling domain. In some embodiments, the costimulatory signaling region is selected from 41BB (i.e., CD137), CD27, ICOS, and/or CD28. In some embodiments, the cell activation agent is conjugated to or absorbed on the first population of mesoporous silica particles or a second population of mesoporous silica particles. In some embodiments, the cell activation agent is a T cell stimulating compound, an anti-idiotype antibody to a CAR antigen binding domain, and/or a tumor antigen. In some embodiments, the T-cell stimulating compound is IL-2, IL-15, anti-CD2 mAb, anti-CD3 mAb, anti-CD28 mAb, neo-antigen peptides, peptides from shared antigens such as TRP2, gp100, tumor cell lysate, CD19, CD20, CD22, ROR1, mesothelin, CD33/IL3Ra, c-Met, PSMA, Glycolipid F77, EGFRvIII, GD-2, NY-ESO-1 TCR, and/or MAGE A3 TCR. In some embodiments, the cell activation agent comprises a CD3/TCR complex and/or an agent that stimulates a costimulatory molecule and/or growth factor receptor, optionally, wherein the cell activation agent is a multispecific binding molecule comprising an agent that stimulates a CD3/TCR complex and an agent that stimulates a costimulatory molecule and/or growth factor receptor. In some embodiments, the cell activation is selected from a sequence provided in Table 20. In some embodiments, the cell activation agent is conjugated to the second population of mesoporous silica particles or to a lipid envelope on the surface of the second population of mesoporous silica particles. In some embodiments, the composition further comprises a cytokine. In some embodiments, the cytokine is conjugated to or adsorbed on the first or second population of mesoporous silica particles. In some embodiments, the cytokine is IL-1, IL-2, IL-4, IL-5, IL-7, IL-10, IL-12, IL-15, IL-17, IL-21, or transforming growth factor beta (TGF-β), or an agonist thereof, a mimetic thereof, a variant thereof, a functional fragment thereof, or a combination thereof.

[0073] Those skilled in the art will recognize or be able to ascertain using no more than routine experimentation, many equivalents to the specific embodiments of the invention described herein. Such equivalents are intended to be encompassed by the following enumerated embodiments.

### Enumerated Embodiments

[0074] 1. A composition, comprising:
[0075] (a) biomaterial comprising a cell recruitment factor;
[0076] (b) a first population of mesoporous silica particles;
[0077] (c) a viral vector; and
[0078] (d) optionally, a cell activation agent.

[0079] 2. The composition of embodiment 1, wherein the biomaterial comprises a hydrogel, optionally a cryogel.

[0080] 3. The composition of embodiment 2, wherein the cryogel:
[0081] (a) comprises gelatin, hyaluronic acid, collagen, alginate, laminin, chitosan, silk fibroin, agarose, poly(ethylene glycol), poly-vinyl alcohol, and/or hydroxyethyl methylacrylate, optionally, wherein the cryogel further comprises laponite;
[0082] (b) comprises pores between about 10 to 300 μm in diameter, optionally between about 50 to 300 μm; and/or
[0083] (c) is chemically cross-linked.

[0084] 4. The composition of any one of the preceding embodiments, wherein the cell recruitment factor is selected from the group consisting of CCL19, CXCL9, CXCL10, XCL1, IL-2, IL-7, CCL21, GM-CSF, CCL17, CCL22, CCL20, CCL27, IL-15, lymphotoxin alpha, lymphotoxin beta, VEGF-C, FLT3L, G-CSF, PDGF, S100A8/A9, CSF-1, CXCL8, CCL20, CCL17, CCR5, CCR6, CCL2, VEGF, Angiopoietin-2, PGE2, LTB4, CXC3L1, CCL19, CCL21, CXCL10, CXCL 11, and/or CXCL12.

[0085] 5. The composition of any one of the preceding embodiments, wherein the cell recruitment factor selectively recruits immune cells, optionally T-cells and/or NK-cells.

[0086] 6. The composition of embodiment 5, wherein the cell recruitment factor is selected from the group consisting of:
[0087] (a) IL-2, IL-7, CCL21, IL-15, GM-CSF, and/or VEGF-C for the recruitment of T-cells; and/or
[0088] (b) CXCL12, CXC3L1, CCL19, CCL21, CXCL10, and/or CXCL11 for the recruitment of NK-cells.

[0089] 7. The composition of any one of the preceding embodiments, wherein the cell recruitment factor is VEGF-C, optionally as a monomer or a dimer.

[0090] 8. The composition of embodiment 7, wherein the VEGF-C is a mature VEGF-C peptide, optionally the minor or major mature form or a mutated variant each thereof.

[0091] 9. The composition of embodiment 8, wherein the mature VEGF-C peptide comprises a C137A mutation.

[0092] 10. The composition of any one of embodiments 7 to 9, wherein the VEGF-C comprises a sequence provided in Table 18, optionally, wherein the his tag is not included in the sequence.

[0093] 11. The composition of embodiment 10, wherein the VEGF-C comprises a dimer of one or more of a sequence provided in Table 18, optionally, wherein the his tag is not included in the sequence.

[0094] 12. The composition of any one of embodiments 7 to 10, wherein the VEGF-C is present in an effective amount, optionally, in an amount of less than or about 1 mg, less than or about 10 mg, greater than or about 10 μg, greater than or about 1 μg, between about 1 μg and 1 mg, between about 10 μg and 1 mg, between about 1 μg and 10 mg, or between about 10 μg and 10 mg.

[0095] 13. The composition of any one of the preceding embodiments, wherein the viral vector is conjugated to the first population of mesoporous silica particles.

[0096] 14. The composition of embodiment 13, wherein the viral vector is electrostatically or covalently conjugated to the first population of mesoporous silica particles.

[0097] 15. The composition of any one of the preceding embodiments, wherein the first population of mesoporous silica particles are surface modified.

[0098] 16. The composition of embodiment 15, wherein the surface modification on the first population of mesoporous silica particles is —OH (hydroxyl), amine, carboxylic acid, phosphonate, halide, azide, alkyne, epoxide, sulfhydryl, polyethyleneimine, a hydrophobic moiety, or salts thereof, optionally using a C₁ to C₂₀ alkyl or (—O(CH2-CH₂—)₁₋₂₅ linker.

[0099] 17. The composition of embodiment 15, wherein the surface modification on the first population of mesoporous silica particles is a primary, secondary, tertiary, or quaternary amine.

[0100] 18. The composition of embodiment 15, wherein the surface modification on the first population of mesoporous silica particles is a polyethyleneimine having an average molecular weight of about 1000 to 20,000 Da, about 1,200 to 15,000 Da, about 1,500 to 12,000 Da, about 2,000 Da, about 3,000 Da, about 4,000 Da, about 5,000 Da, about 6,000 Da, about 7,000 Da, about 8,000 Da, about 9,000 Da, or about 10,000 Da, as measured by gel permeation chromatography (GPC).

[0101] 19. The composition of any one of the preceding embodiments, wherein the viral vector is a retrovirus, adenovirus, adeno-associated virus, herpes virus, or lentivirus.

[0102] 20. The composition of any one of the preceding embodiments, wherein the viral vector comprises an expression vector comprising a recombinant polynucleotide comprising an expression control sequence operatively linked to a nucleotide sequence to be expressed.

[0103] 21. The composition of embodiment 20, wherein the nucleotide sequence encodes a chimeric antigen receptor (CAR), an engineered TCR, one or more cytokines, one or more chemokines, an shRNA to block an inhibitory molecule, or wherein the nucleotide sequence comprises an mRNA to induce expression of a protein.

[0104] 22. The composition of embodiment 21, wherein the nucleotide sequence encodes a polypeptide engineered to target a tumor antigen.

[0105] 23. The composition of embodiment 22, wherein the tumor antigen selected from the group consisting of: TSHR, CD19, CD123, CD22, CD30, CD171, CS-1, CLL-1, CD33, EGFRvIII, GD2, GD3, BCMA, Tn Ag, PSMA, ROR1, FLT3, FAP, TAG72, CD38, CD44v6, CEA, EPCAM, B7H3, KIT, IL-13Ra2, Mesothelin, IL-11Ra, PSCA, PRSS21, VEGFR2, LewisY, CD24, PDGFR-beta, SSEA-4, CD20, Folate receptor alpha, ERBB2 (Her2/neu), MUC1, EGFR, NCAM, Prostase, PAP, ELF2M, Ephrin B2, IGF-I receptor, CAIX, LMP2, gp100, bcr-abl, tyrosinase, EphA2, Fucosyl GM1, sLe, GM3, TGS5, HMWMAA, o-acetyl-GD2, Folate receptor beta, TEM1/CD248, TEM7R, CLDN6, GPRC5D, CXORF61, CD97, CD179a, ALK, Polysialic acid, PLAC1, GloboH, NY-BR-1, UPK2, HAVCR1, ADRB3, PANX3, GPR20, LY6K, OR51E2, TARP, WT1, NY-ESO-1, LAGE-1a, MAGE-A1, legumain, HPV E6, E7, MAGE A1, ETV6-AML, sperm protein 17, XAGE1, Tie 2, MAD-CT-1, MAD-CT-2, Fos-related antigen 1, p53, p53 mutant, prostein, survivin and telomerase, PCTA-1/Galectin 8, MelanA/MART1, Ras mutant, hTERT, sarcoma translocation breakpoints, ML-IAP, ERG (TMPRSS2 ETS fusion gene), NA17, PAX3, Androgen receptor, Cyclin B1, MYCN, RhoC, TRP-2, CYP1B1, BORIS, SART3, PAX5, OY-TES1, LCK, AKAP-4, SSX2, RAGE-1, human telomerase reverse transcriptase, RU1, RU2, intestinal carboxyl esterase, mut hsp70-2, CD79a, CD79b, CD72, LAIR1, FCAR, LILRA2, CD300LF, CLEC12A, BST2, EMR2, LY75, GPC3, FCRL5, IGLL1, and any combination thereof.

[0106] 24. The composition of any one of the preceding embodiments, wherein the vector encodes a CAR that comprises an antigen binding domain, a transmembrane domain, a costimulatory signaling region, and a signaling domain.

[0107] 25. The composition of embodiment 24, wherein:
[0108] (a) the antigen binding domain binds an antigen selected from CD19, CD123, CD22, CD20, EGFRvIII, BCMA, Mesothelin, CD33, CLL-1, and any combination thereof,
[0109] (b) the transmembrane domain comprises a CD8 hinge;
[0110] (c) the costimulatory signaling region is selected from a 4-1BB or CD28 costimulatory signaling domain; and/or
[0111] (d) the signaling region comprises a CD3 zeta signaling domain.

[0112] 26. The composition of any one of the preceding embodiments, wherein the cell activation agent is a T cell stimulating compound, an anti-idiotype antibody to a CAR antigen binding domain, or the tumor antigen.

[0113] 27. The composition of any one of the preceding embodiments, wherein the cell activation agent:
[0114] (a) comprises a CD3/TCR complex and/or an agent that stimulates a costimulatory molecule and/or growth factor receptor;
[0115] (b) is a multispecific binding molecule comprising n agent that stimulates a CD3/TCR complex and an agent that stimulates a costimulatory molecule and/or growth factor receptor; and/or
[0116] (c) comprises a sequence provided in Table 20 and/or provided in one or more format according to FIG. 37.

[0117] 28. The composition of any one of the preceding embodiments, wherein the cell activation agent is conjugated to or adsorbed on the first population of mesoporous silica particles, a second population of mesoporous silica particles, or to a lipid envelope on the surface of the second population of mesoporous silica particles.

[0118] 29. The composition of any one of the preceding embodiments, wherein the mesoporous silica particles are mesoporous silica rods.

[0119] 30. The composition of any of the preceding embodiments, wherein the mesoporous silica particles comprise pores of between 2-50 nm in diameter.

[0120] 31. The composition of any of the preceding embodiments, wherein the mesoporous silica particles have a surface area of at least about 100 m²/g.

[0121] 32. The composition of any of the preceding embodiments, wherein the composition is suitable for injectable use.

[0122] 33. A method of transducing cells in vivo comprising administering the composition of any one of embodiments 1 to 32, each component being administered simultaneously or sequentially.

[0123] 34. A method of treating a disease, disorder, or condition comprising administering the composition of any one of embodiments 1 to 32, each component being administered simultaneously or sequentially.

[0124] 35. The method of embodiment 34, wherein the disease, disorder, or condition is cancer.

### BRIEF DESCRIPTION OF THE DRAWINGS

[0125] FIG. 1 presents a series of surface modifications on mesoporous silica particles.

[0126] FIG. 2 presents results from staining for viral envelope protein (VSV-G) on MSR surface after adsorption of VSV-G pseudotyped lentivirus onto MSRs. The control MSRs are presented on the top panel and virus-incubated rods are on the bottom panel.

[0127] FIG. 3 is a schematic of virus adsorption on MSRs and transduction of T cells.

[0128] FIG. 4 provides results from GFP expression by T cells incubated with free lentivirus or MSR-bound lentivirus. Dilution of virus-coated MSRs from 40 μg/ml starting concentration is as indicated. The “1× lenti” condition is equivalent to the amount of virus incubated with the MSR conditions. The “2× lenti” condition is equivalent to twice the amount used to coat the MSR conditions.

[0129] FIG. 5 provides a schematic of overall strategy for ligand presentation on MSR surface. Liposomes are incubated with MSRs to form a supported lipid bilayer. Ligands can be coupled to the MSR-lipid bilayer using streptavidin-biotin interactions.

[0130] FIG. 6 shows a picture of MSRs coated with POPC liposomes containing 1 mol % PE-carboxyfluorescein. Bright field (left), fluorescence (middle), and overlay (right) images are shown.

[0131] FIG. 7 depicts the peptide sequence of EGFRvIII CAR-binding peptide (LEEKKGNYVVTDH (SEQ ID NO: 756)).

[0132] FIG. 8 illustrates cytokine production of EGFRvIII CARTs by peptide immobilization on MSRs. Results provide interferon-gamma and interleukin-2 production of EGFRvIII CARTs stimulated by lipid-coated MSRs (1% PE-biotin in the lipid coating) presenting EGFRvIII-CAR binding peptide compared to control conditions control conditions.

[0133] FIG. 9 illustrates the proliferation of EGFRvIII CARTs by peptide immobilization on MSRs. A lipid-coated MSR composition of 0.01% PE-biotin was used for peptide immobilization, and the MSR concentration was 30 μg/ml in the well. Cell counts were performed at day 7 of culture under the indicated conditions.

[0134] FIGS. 10A and 10B illustrate the proliferation of EGFRvIII CARTs and final cellular composition by peptide immobilization on MSRs. The starting MSR concentration was 50 μg/ml with and the dilutions of MSRs from this starting concentration are as indicated in the axis. FIG. 10A shows the percentage of CD4 and CD8 T cells at the end of culture period with the indicated materials. FIG. 10B depicts the FACS analysis of CD8+ and CD4+ CAR T cells diluting CFSE during a 3-day culture period using MSRs with varying amount of EGFRvIII CAR-binding peptide with or without anti-CD28 on the MSR surface.

[0135] FIGS. 11A and 11B illustrate the proliferation of BCMA CARTs and final cellular composition by BCMA protein immobilization on MSRs. The starting MSR concentration was 50 μg/ml with and the dilutions of MSRs from this starting concentration are as indicated in the axis. FIG. 11A shows percentage of CD4 and CD8 T cells at the end of culture period with the indicated materials. FIG. 11B demonstrates FACS analysis of CD8+ and CD4+ CAR T cells diluting CFSE during a 3-day culture period using MSRs with varying amount of EGFRvIII CAR-binding peptide with or without anti-CD28 on the MSR surface.

[0136] FIG. 12 presents a schematic of simultaneous stimulation and transduction of unstimulated human T cells using MSRs, according to some embodiments. Two populations of MSRs are created—1) MSRs presenting agonistic CD3/CD28 antibodies to stimulate T cells, 2) Positively charged PEI-MSRs that have been bound with lentivirus to facilitate viral delivery to the T cells. The two types of MSRs can be mixed together in different ratios to adjust the amount of stimulation and virus that the T cells are exposed to.

[0137] FIG. 13 illustrates the transduction efficiency of T cells exposed to stimulatory (anti-CD3/CD28 antibody-immobilized MSRs) and PEI-MSRs incubated with virus. T cells were incubated with different amounts of stimulating rods (Stim 1.00 represents 70 μg/ml MSRs) and exposed to GFP-lentivirus at different multiplicities of infection (MOI) either bound to PEI-MSRs or in free virus form. The top concentration of MSRs in the virus conditions was 22 μg/ml.

[0138] FIG. 14 illustrates transduction efficiency of T cells exposed to stimulatory (anti-CD3/CD28 antibody-immobilized) MSRs and PEI-MSRs incubated with virus. Plots show transduction efficiency as a function of the concentration of stimulatory MSRs at various total amounts of virus. The MSR concentration of stimulating MSR condition 1.0 is 70 μg/ml. The concentration of MSRs in the PEI MSR condition 1 is 22 μg/ml. Transduction was assessed at 3 days after initiation of the culture.

[0139] FIG. 15 provides results from comparison of virus delivery strategies for transduction efficiency. In the “PEI” and “free” conditions T cells were stimulated with a “high” level of CD3/CD28 antibodies bound to MSRs (MSR concentration 70 μg/ml), and given virus either associated with PEI-MSRs or freely delivered in the media, respectively (virus concentration 1.0 contains 22 μg/ml MSRs, MOI ˜6.7). In the “PEI+CD3/CD28” the virus and CD3/CD28 agonistic antibodies were bound to PEI-MSRs (concentration 1.0 is 22 μg/ml MSRs). Transduction was assessed at 3 days after initiation of the culture.

[0140] FIG. 16 provides results from comparison of various delivery strategies for transduction in PBMC population. Conditions as in FIG. 15 were added to PBMCs. The proportion of transduced cells in each cell type was quantified. Transduction was assessed at 3 days after initiation of the culture.

[0141] FIG. 17 provides the different transduction fractions in PBMCs with various virus delivery strategies. Top panel provides the total cell composition present in PBMC populations under the conditions of FIG. 15. Bottom panel provides the composition of the transduced cell fraction present after virus delivery using the conditions of FIG. 15. Transduction was assessed at 3 days after initiation of the culture.

[0142] FIG. 18 provides a non-limiting exemplary schematic of the composition disclosed herein for use as a cancer therapeutic wherein (A) depicts delivering the growth factor VEGF-C that induces lymphangiogenesis of pre-existing skin lymphatic capillaries; (B) depicts the generated lymphatic endothelial cells secrete chemokines (such as CCL21) that attract immune cells (primarily naive T cells) from the blood circulation into the dermis on top of the gel; (C) depicts lymphatic endothelial cells educating T cells—not to be bound by theory, Applicants believe that such education could yield a high proportion of stem cell memory phenotype, which in turn may be more potent cells once transduced; after T cells are recruited to this priming site, (D) depicts lentivirus encoding for one or more chimeric antigen receptors (CARs) being delivered in combination with mesoporous silica rods to prevent systemic spread—not to be bound by theory, Applicants believe that local positioning of the virus could favor transduction of locally recruited T cells and that activation could further improve transduction, prevent leakage, and transduction of unwanted cells; (E) and (F) depict transduced and educated cells returning into systemic circulation via the skin lymphatics, lymph nodes and thoracic duct—not to be bound by theory, Applicants believe that such cells will further expand in response to tumor antigen.

[0143] FIGS. 19A-19C lay out the characteristics of various VEGF-C protein variants. FIG. 19A provides a schematic of both natural and modified VEGF-C. Immature VEGF-C(#1) is normally found intracellularly with N-terminal and C-terminal propeptide sequences. Once released, VEGF-C protein undergoes proteolytic cleavage and is present in the extracellular space as minor or major mature form (#2, #7) in dimer or monomer form. Stabilized dimers of major (#9) and minor mature (#8) form were engineered by inserting the C137A mutation into the sequences. The main difference between minor mature and major mature forms is the presence of an additional short propeptide sequence on the minor mature form N-terminus. Not to be bound by theory, Applicants believe the additional short propeptide appears to boost dimer formation as well as protein expression in both HEK293T and CHO MaKo cells. FIG. 19B depicts an SDS-polyacrylamide gel subjected to electrophoresis under non-reducing (NR) and reducing conditions (R) loaded with purified VEGF-C variants. Details of the wells with the corresponding VEGF-C variant are shown in FIG. 19C and presence of dimer (**) and monomer (*) have been indicated with asterix. The immature VEGF-C with the full length propepitde (#1) is produced as a dimer, among some impurities (wells 2 and 3); the removal of the propeptide leads to the production of two major mature VEGF-C forms (#2), one non-covalent dimer form (wells 5, 6) and a monomeric form (wells 8, 9); adding the mutation C137A in #2 leads to the production of a covalent dimer (well 21, 22) and a monomer form (well 24, 25). A short N-terminal propeptide is left attached to the protein to generate a minor mature VEGF-C form (#7) in non-covalent dimer (wells 11,12) or in monomeric form (wells 15,16). Not to be bound by theory, Applicants have determined that the C137A mutation to #7 VEGF-C leads to the generation of VEGF-C dimer only (wells 18,19) which may be suitable for large scale production. Rows 1, 4, 7, 10, 13, 14, 17, 20, 23 and 26 show the molecular weight marker in kDa.

[0144] FIGS. 20A-20C show the results of HDLECs sprouting assay with various VEGF-C variants. Dimeric VEGF-C forms appeared to demonstrate good in vitro activity. FIG. 20A depicts the experimental setup of in vitro sprouting assay on human dermal lymphatic endothelial cells (HDLECs) to test biological activity of VEGF-C variants. After incubation cells were FIG. 20B assessed for proliferation by WT-8 assay and FIG. 20C imaged for tube formation after phalloidin staining. Tube formation images show that the major and minor mature forms (#2, 7, 8, 9) stimulate better sprouting of HDLECs than immature form (#1). Not to be bound by theory, it is believed that the dimeric forms (#2D,7D,8D,9D) superior sprouting activity renders them preferable to monomeric forms (#2M,7M,9M).

[0145] FIGS. 21A-21D show the release rate of VEGF-C from alginate cryogel formulations, as well as proof of concept that it can be injected subcutaneously in a mouse. FIG. 21A provides a non-limiting, exemplary schematic of alginate cryogels manufacturing. Alginate liquid prepolymer is mixed with laponite and protein of interest, then frozen and thawed again before injection to generate porous matrix. FIG. 21B shows the modulation of VEGF-C release in vitro by different types of alginate gels: alginate nanoporous (gelification occurs before cryogelation so no pores are formed), alginate cryogel (after freeze and cryogelation, porous), and alginate cryogel with 0.25% laponite. 0.25% laponite alginate cryogel is showing a controlled and long-lasting release of VEGF-C protein in vitro. FIG. 21C shows the modulation of VEGF-C release profile in vitro from 0.25% or 0.5% laponite alginate cryogels loaded with 10 μg or 50 μg VEGF-C. 30% of the total VEGF-C is released from the gels and given the controlled release profile, 0.25% laponite alginate cryogel was chosen for in vivo work. FIG. 21D is an image depicting cryogel injected subcutaneously in mice with a 16G needle.

[0146] FIGS. 22A-22C depict induction of in vivo lymphoangiogensis by VEGF-C in naive mouse skin. Not to be bound by theory, the minor mature covalent dimeric VEGF-C appears to have superior efficacy. FIG. 22A depicts the in vivo experimental setup and FIG. 22B shows representative dot plots showing in vivo lymphangiogenesis assessed by staining of lymphatic endothelial cells (CD45−, CD31+, PDPN+) by flow cytometry after skin digestion performed 14 days after cryogel implantation. In FIG. 22C, lymphangiogenesis in mouse skin quantified after staining as lymphatic endothelial cells counts/mg. Covalent dimers (#8, #9) show high in vivo lymphangiogenesis. Accordingly, #8 was used in further experiments. PDPN: podoplanin.

[0147] FIGS. 23A-23E show that skin lymphatics respond to 10 g VEGF-C(#7 variant, SEQ ID NO: 734) delivered by alginate cryogels and lymphangiogenesis peaks 14 days after cryogel implant, which corresponds to peak immune-infiltration in naïve skin of C57/BL6 mice. FIG. 23A depicts the in vivo dose response of VEGF-C loaded into alginate cryogels (1, 10, 20, 50 μg) and lymphangiogenesis induction (represented as total lymphatic endothelial cells (LECs) counts/mg tissue, upper graph) and time course of lymphangiogenesis after delivery of 10 μg VEGF-C(lower graph). These results indicated that 10 μg of VEGF-C induced high in vivo lympahangiogenesis and that peak lymphangiogenesis was observed 14 days after subcutaneous cryogel delivery. FIG. 23B Representative plots of LECs (CD45−CD31+PDPN+) and blood endothelial cells (BECs, CD45−CD31+PDPN−) staining isolated after skin digestion of C57/BL6 mice 14 days after gel implant. FIG. 23C Quantification of endothelial cells as total cell counts/mg tissue. FIG. 23D Quantification represented as total cell counts/mg tissue of CD4+ T cells and CD8+ T cells. LECs counts correlate with T cells infiltrates, especially of a naïve phenotype (CD62L+, CD44−). Bar graphs include 5 independent experiment pooled for VEGF-C and control conditions, VEGF-C n=30, control n=18, naïve n=3 and are represented as mean+SEM, Mann-Whitney non-parametric t-test, ****, p<0.0001; **, p<0.01. FIG. 23E shows quantification of indicated cell types (LECs, CD4 T cells, or CD8 T cells) per mg of tissue over the days following VEGF-C alginate cryogel injection.

[0148] FIGS. 24A-24C confirm that VEGF-C #8 produced in CHO MaKo cells is functional. In FIG. 24A, HDLECs in vitro sprouting assay shows comparable activity of VEGF-C protein #8 produced in CHO cells (8CHO) compared to #8 produced in HEK293T cells. In FIG. 24B, comparable bioactivity was confirmed also in vivo by staining LECs after skin digestion 14 days after cryogel delivery. FIG. 24C shows quantification of lymphangiogenesis as total LECs counts/mg tissue in mice injected with blank cryogel or cryogel loaded with #8HEK or #8CHO VEGF-C. BECs (CD45−CD31+PDPN−) are not affected by the VEGF-C #8 delivery, while peak lymphangiogenesis corresponded to peak immune infiltration of CD4 and CD8 T cells (CD45+) in the skin on top of the cryogels on day 14 after cryogel delivery. n>9. Bar graphs represented as mean+SEM, Mann-Whitney non-parametric t-test between CHO vs control, HEK vs control or CHO vs HEK, ****, p<0.0001; **, p<0.01 FIGS. 25A-25C demonstrate that VEGF-C also induces lymphangiogensis in immunocompromised NSG mice and mouse LECs efficiently recruit human peripheral blood monoculear cells (PBMCs). FIG. 25A provides representative flow cytometry plots of skin LECs and BECs statining in NSG, C57/BL6 mice 14 days after VEGF-C(variant #8, minor mature form with C137A mutation, SEQ ID NO: 736) or blank cryogel delivery. FIG. 25B lays out the experimental setup of gel delivery in NSG mice and subsequent intravenous injection of human PBMCs (on day 10). Mice were euthanized and analyzed for lymphangiogenesis and immune infiltration in the skin on day 17 post gel implant. FIG. 25C shows quantification represented as total counts/mg of LECs, total T cells (CD45+CD3+) CD8 (CD3+CD8+) and CD4 (CD3+CD4+) T cells subsets, as well as B cells (CD45+CD19+). These data demonstrate that T cells are the main cell types of PBMCs recruited in NSG mice.

[0149] FIGS. 26A-26B provide a schematic of VEGF-C delivery in mouse skin generating a secondary priming site for T cells to be educated and transduced after injection of viral particles bound to mesoporous silica particles (MSPs), e.g., homogenized mesoporous silica rods (MSRs), in combination with MSP-bound STARTERS (e.g., homogenized MSR-bound STARTERS) (FIG. 26A) or free virus in combination with MSP-bound STARTERS (e.g., homogenized MSR-bound STARTERS) (FIG. 26B).

[0150] FIGS. 27A-27B provide characterization of loading capacity of MSPs, in particular homogenized MSRs, with CD 19 CAR encoding lentivirus. Trimethylammonium MSRs were co-incubated with GFP-expressing lentivirus at various amounts according to functional titer as determined by cell-based transduction assays. The amount of virus in three fractions was characterized—viral loading solution (initial input added to the MSRs), MSR-bound virus (amount remaining bound to the MSRs after incubation and washing), and unbound virus (the amount in the solution remaining after co-incubation of MSRs and virus). MSR and virus were co-incubated for 30 minutes on ice, the supernatant was removed (Unbound Virus) and the MSRs were washed twice prior to assessing MSR-bound virus. The untouched Viral Loading Solutions from each condition were also analyzed. In FIG. 27A, results show the majority of the virus in the input Virus Loading Solution is retained in the MSR-bound virus fraction after adsorption and washing. The amount of virus adsorbed to the MSRs increases with the amount of virus in the Virus Loading Solution. FIG. 27A shows the calculated fraction of MSR-bound virus relative to the Virus Loading Solution has a strong efficiency of loading and retention on the MSRs following adsorption and washing.

[0151] FIG. 28 provides characterization of retention of virus on MSPs, in particular homogenized MSRs. Lentivirus and MSRs were co-incubated for 30 minutes on ice, and the MSRs were washed twice. MSRs were then cultured in R10 medium containing 10% FCS or OpTmizer serum-free medium, and the input virus stock was incubated in media as well. The supernatant was removed at the indicated times after the start of incubation and analyzed for total virus content. Results indicate that the MSRs release only a fraction of the input virus over the first 18 hours.

[0152] FIGS. 29A-29C show functional generation of CAR-T cells using MSP, in particular homogenized MSR, bound to a CD19 CAR encoding (CAR19) virus. CARTs were generated either with free lentivirus (CAR-free) or with lentivirus bound to trimethylammonium MSRs (CAR-MSR). The MOI used for CAR-free transduction and the MOI of total virus used for adsorption to MSRs in the CAR-MSR condition is indicated. These MOIs were chosen to produce CARTs with similar transduction efficiency between the two conditions. MSRs were washed after the adsorption step, thus the total amount of virus in the transduction of the T cells in the MSR condition may occur at a lower MOI than indicated. 4.3e6 TU/virus per 1 mg of MSRs was used in the co-incubation of MSR and virus prior to washing and plating with T cells. T cells were treated with Construct 4 (Table 20, FIG. 38A-38B) and the indicated virus preparation for 1 day, followed by washing and culture for an additional 3 days. FIG. 29A shows CAR+% measured at day 4 after transduction. Cells were used in killing assays with Nalm6-Luc cells at day 4 post-transduction and co-incubated at the indicated Effector:Target (E:T ratio; T cells) after normalizing for total cells and CAR+ cells. Results indicate that FIG. 29B specific killing activity and FIG. 29C interferon-gamma release during the co-incubation for 24 hours were comparable between CAR-MSR and CAR-free, showing that transduction by formulation with MSRs produces equivalently functional CARTs in vitro compared to conventional free virus transduction.

[0153] FIGS. 30A-30B demonstrate that MSR injectability was improved through size reduction by homogenization. MSRs were homogenized using a bead mixer to reduce their size and improve injectability. In FIG. 30A, size reduction was seen in terms of MSR length, and this allowed injection through a smaller diameter needle into the intradermal space. In FIG. 30A, standard trimethylammonium MSRs or homogenized MSRs were adsorbed with lentivirus and a dilution series of this complex was created and used to transduce T cells with a GFP-encoding lentivirus. Homogenization of MSRs did not substantially alter transduction performance in vitro.

[0154] FIGS. 31A-31B depict an hematoxylin and eosin (H&E) stained section of skin containing adjacent cryogel and MSPs, in particular homogenized MSRs. Blank alginate cryogels were injected subcutaneously and 7 days later viral particles (4e6 TU) free or bound to MSRs were injected in the intradermal space on top of the gel with insulin syringe (for MSR-virus group) or Hamilton syringe (for free virus). 72h after viral delivery, mice were euthanized, and tissues (skin and draining lymph node) were harvested for immunohistochemistry analysis. To facilitate the delivery of VEGF-C to the lymphatic capillaries, the cryogel was implanted into the high subcutaneous space on top of the panniculus muscle. FIG. 31A, which depicts H&E stained sections, demonstrated the location of the subcutaneous cryogel superficial to the panniculus muscle in the hypodermis. The MSPs, in particular homogenized MSRs, appeared as lightly eosinophilic granular material admixed with mononuclear cells positioned at the dermal-hypodermal junction adjacent to the implanted cryogel (FIG. 31A and FIG. 31B for close up).

[0155] FIGS. 32A-32B show in situ hybridization for CAR mRNA on sections of skin. In situ hybridization to detect CAR mRNA transcript demonstrated robust signal within regions corresponding to the injected MSP, in particular homogenized MSR, in mice injected with MSR-bound virus (FIG. 32A), while it detected diffuse signal in cells infiltrating the gel, as well as cells adjacent to it in the free virus condition (FIG. 32B). Not to be bound by theory, Applicants believe these data support the notion that MSPs, in particular homogenized MSRs, may maintain the virus localized in the dermis where the T cells are infiltrating the skin.

[0156] FIGS. 33A-33B show a mouse injected with MSP-virus, in particular homogenized MSR-virus, had less CAR mRNA transcript positive cells in draining lymph node compared to free virus group. In situ hybridization for CAR mRNA on sections of draining lymph node (dLN). In situ hybridization detected only one CAR mRNA transcript positive cells within the dLN of mice injected with MSR-bound virus (FIG. 33A), while mice injected with free-virus showed few CAR mRNA transcript positive cells in the subcapsular sinus consistent with local drainage of the virus or the cells from the site of cryogel implantation (FIG. 33B).

[0157] FIGS. 34A-34C show the generation of CD19+ CART cells in vivo and B cells depletion in the spleen. FIG. 34A provides a timeline for experimental setup of in vivo CART manufacturing. On day 0 VEGF-C loaded alginate cryogels were injected subcutaneously in NSG mice. On day 10 (3 days before we know peak lymphangiogeneiss is achieved), PBMCs are intravenously injected into mice and 7 days later (on day 17) MSP-virus (in particular homogenized MSR-virus), free-virus or PBS as control were injected in the respective groups together with MSP-STARTERS, in particular homogenized MSR-STARTERS, to possibly promote T cells activation and favor T cells transduction. On day 35 mice were euthanized and spleen, blood and can were collected to determine if in vivo CD19 CAR encoding viral delivery elicited transduction of T Cells recruited by VEGF-C induced lymphangiogenesis. FIG. 34B provides representative flow cytometry (FACS) plots of immune populations showing B cells depletion and T cells transduction (CD19 CAR+ cells) in the spleen of mice treated with free virus or MSP-virus, in particular homogenized MSR-virus. FIG. 34C is a quantification of B cells depletion and CAR-T cells in the spleen of the mice in all groups.

[0158] FIG. 35 demonstrates that minimal transduction of non-T cells by the composition. Provided are representative flow cytometry (FACS) plots of human CD11b+ monocytes, mouse monocytes (non-functional in NSG mouse), as well as stromal cells in the spleen of mice treated with free virus or MSP-virus, in particular homogenized MSR-virus, or PBS control. Few human monocytic cells showed a positive staining for CD 19 CAR.

[0159] FIGS. 36A-36B show B cell depletion correlates with CAR-T cell expansion in spleen and blood. In FIG. 36A, CART cells (total counts/mg tissue) are plotted versus B cells (total counts/mg tissue) in spleen, and, in FIG. 36B, CART cells (blood, represented as total cell counts/μl) are plotted versus B cell depletion (spleen, represented as total cell counts/mg tissue).

[0160] FIG. 37A-37C provide exemplary schema for bispecific antibodies, including single bispecific antibody schema (FIG. 37A), multimeric bispecific antibody schema (FIG. 37B), and a figure legend (FIG. 37C).

[0161] FIG. 38. T cells are recruited at the site of implant. FIG. 38 shows experimental setup (above) and representative image (below) of IHC analysis of CD3 on mouse skin receiving the cryogel-VEGF-C implant plus MSP-virus and MSP-STARTERS 18 days after viral delivery.

[0162] FIG. 39. CAR ISH signal in mononuclear cells surrounding the gel. FIG. 39 shows representative images of CAR ISH analysis (CD19 CAR RNA) of cells in mouse skin receiving the cryogel-VEGF-C implant plus MSP-virus and MSP-STARTERS 18 days after viral delivery.

[0163] FIG. 40. Locally in vivo generated CAR-T cells migrate to the spleen and correlate with B cell depletion. FIG. 40 is representative image of CAR ISH analysis of cells in mouse spleen receiving the cryogel-VEGF-C implant plus MSP-virus and MSP-STARTERS 18 days after viral delivery.

[0164] FIGS. 41A-41B. Generation of in vivo CAR-T cells correlates with B cells killing at the implant site and in the spleen. Representative image of fluorescently labelled CD19+B cells and CD3+ T cells at the implant site (FIG. 41A, fluorescent image upper panel and brightfield image lower panel), as well as in the spleen (FIG. 41B) of mice receiving the cryogel-VEGF-C implant plus MSP-virus and MSP-STARTERS 18 days after viral delivery.

[0165] FIGS. 42A-42B. Analysis of circulating human T cells in NSG mice over time. FIG. 42A shows experimental design and groups. FIG. 42B is a set of graphs showing flow cytometry analysis over time of implanted mice. Flow cytometry data represented as Mean±SEM.

[0166] FIGS. 43A-43B. B cell depletion in circulation correlates with CART cells expansion. Flow cytometry analysis over time of CART cells (FIG. 43A) and B cells (FIG. 43B) in the circulation of implanted mice. Flow cytometry data represented as Mean±SEM (in FIGS. 43A and 43B) or as individual curves for each mouse (FIG. 43B).

[0167] FIGS. 44A-44B. Strong correlation of CART cell expansion with B cell depletion in the circulation and in the spleen. Correlation of B cell number and T cell number in the blood (FIG. 44A) and in the spleen (FIG. 44B) of mice treated with the different conditions. Cell number represents cell counts/mg tissue or counts/μl for blood determined during flow cytometry analysis.

[0168] FIGS. 45A-45B. Quantification of CART cell expansion and corresponding B cell depletion in the spleen 18 days after viral delivery. Quantification of CART (FIG. 45A) and B cells (FIG. 45B) counts/mg tissue in the spleen of treated mice. Flow cytometry data represented as Mean±SEM.

[0169] FIGS. 46A-46D. CART cell expansion correlates to lymphangiogenesis as well as local B cell depletion in the skin 18 days after viral delivery. Quantification of CART (FIG. 46A) and B cells (FIG. 46B) counts/mg tissue in the spleen of treated mice. Flow cytometry data represented as Mean±SEM. Correlation plot of B cell number and CART cell number (FIG. 46C) as well as CART cell number and lymphatic endothelial cell (LEC) number (FIG. 46D) in the skin. In correlation plots, cell numbers are represented as counts/mg tissue.

[0170] FIG. 47. GFP transgene expression as a function of MSP dose.

[0171] FIG. 48A-48B depicts schema of the 17 different multispecific constructs comprising a CD3 antigen binding domain comprising a heavy and light chain derived from an anti-CD3 antibody and, in all but control Constructs 11, 14, and 17, an a CD28 or CD2 antigen binding domain, as noted, comprising a heavy and light chain derived from an anti-CD28 or CD2 antibody, respectively. Not to be bound by theory, it is appreciated that any one or more of these constructs may be used as a cell activation agent as disclosed herein.

[0172] Construct 1 comprises an anti-CD3 scFv fused to an anti-CD2 Fab, which is further fused to an Fc region. Construct 1 comprises a first chain and a second chain. The first chain comprises, from the N-terminus to the C-terminus, anti-CD2 VL and CL. The second chain comprises, from the N-terminus to the C-terminus, anti-CD3 VH, (G4S)4 linker (SEQ ID NO: 29), anti-CD3 VL, (G4S)4 linker (SEQ ID NO: 29), anti-CD2 VH, CH1, CH2, and CH3. Construct 2 comprises an anti-CD3 scFv fused to an anti-CD28 Fab, which is further fused to an Fc region. Construct 2 comprises a first chain and a second chain. The first chain comprises, from the N-terminus to the C-terminus, anti-CD28 VL and CL. The second chain comprises, from the N-terminus to the C-terminus, anti-CD3 VH, (G4S)4 linker (SEQ ID NO: 29), anti-CD3 VL, (G4S)4 linker (SEQ ID NO: 29), anti-CD28 VH, CH1, CH2, and CH3. Construct 3 comprises an anti-CD2 Fab fused to an Fc region, which is further fused to an anti-CD3 scFv. Construct 3 comprises a first chain and a second chain. The first chain comprises, from the N-terminus to the C-terminus, anti-CD2 VL and CL. The second chain comprises, from the N-terminus to the C-terminus, anti-CD2 VH, CH1, CH2, CH3, (G4S)4 linker (SEQ ID NO: 29), anti-CD3 VH, (G4S)4 linker (SEQ ID NO: 29), anti-CD3 VL. Construct 4 comprises an anti-CD28 Fab fused to an Fc region, which is further fused to an anti-CD3 scFv. Construct 4 comprises a first chain and a second chain. The first chain comprises, from the N-terminus to the C-terminus, anti-CD28 VL and CL. The second chain comprises, from the N-terminus to the C-terminus, anti-CD28 VH, CH1, CH2, CH3, (G4S)4 linker (SEQ ID NO: 29), anti-CD3 VH, (G4S)4 linker (SEQ ID NO: 29), anti-CD3 VL. Construct 5 comprises an anti-CD2 Fab fused to an anti-CD3 scFv, which is further fused to an Fc region. Construct 5 comprises a first chain and a second chain. The first chain comprises, from the N-terminus to the C-terminus, anti-CD2 VL and CL. The second chain comprises, from the N-terminus to the C-terminus, anti-CD2 VH, CH1, (G4S)2 linker (SEQ ID NO: 767), anti-CD3 VH, (G4S)4 linker (SEQ ID NO: 29), anti-CD3 VL, (G4S)4 linker (SEQ ID NO: 29), CH2, and CH3. Construct 6 comprises an anti-CD28 Fab fused to an anti-CD3 scFv, which is further fused to an Fc region. Construct 6 comprises a first chain and a second chain. The first chain comprises, from the N-terminus to the C-terminus, anti-CD28 VL and CL. The second chain comprises, from the N-terminus to the C-terminus, anti-CD28 VH, CH1, (G4S)2 linker (SEQ ID NO: 767), anti-CD3 VH, (G4S)4 linker (SEQ ID NO: 29), anti-CD3 VL, (G4S)4 linker (SEQ ID NO: 29), CH2, and CH3.

[0173] Construct 7 comprises an anti-CD3 scFv fused to an Fc region, which is further fused to an anti-CD2 Fab. Construct 7 comprises a first chain and a second chain. The first chain comprises, from the N-terminus to the C-terminus, anti-CD2 VL and CL. The second chain comprises, from the N-terminus to the C-terminus, anti-CD3 VH, (G4S)4 linker (SEQ ID NO: 29), anti-CD3 VL, (G4S) linker (SEQ ID NO: 768), CH2, CH3, (G4S)4 linker (SEQ ID NO: 29), anti-CD2 VH, and CH1. Construct 8 comprises an anti-CD3 scFv fused to an Fc region, which is further fused to an anti-CD28 Fab. Construct 8 comprises a first chain and a second chain. The first chain comprises, from the N-terminus to the C-terminus, anti-CD28 VL and CL. The second chain comprises, from the N-terminus to the C-terminus, anti-CD3 VH, (G4S)4 linker (SEQ ID NO: 29), anti-CD3 VL, (G4S) linker (SEQ ID NO: 768), CH2, CH3, (G4S)4 linker (SEQ ID NO: 29), anti-CD28 VH, and CH1.

[0174] Construct 9 comprises an anti-CD2 Fab fused to a first Fc region and an anti-CD3 scFv fused to a second Fc region. Construct 9 comprises a first chain, a second chain, and a third chain. The first chain comprises, from the N-terminus to the C-terminus, anti-CD2 VL and CL. The second chain comprises, from the N-terminus to the C-terminus, anti-CD2 VH, CH1, CH2, and CH3. The third chain comprises, from the N-terminus to the C-terminus, anti-CD3 VH, (G4S)4 linker (SEQ ID NO: 29), anti-CD3 VL, (G4S) linker (SEQ ID NO: 768), CH2, and CH3. Construct 10 comprises an anti-CD28 Fab fused to a first Fc region and an anti-CD3 scFv fused to a second Fc region. Construct 10 comprises a first chain, a second chain, and a third chain. The first chain comprises, from the N-terminus to the C-terminus, anti-CD28 VL and CL. The second chain comprises, from the N-terminus to the C-terminus, anti-CD28 VH, CH1, CH2, and CH3. The third chain comprises, from the N-terminus to the C-terminus, anti-CD3 VH, (G4S)4 linker (SEQ ID NO: 29), anti-CD3 VL, (G4S) linker (SEQ ID NO: 768), CH2, and CH3. Construct 11 comprises an anti-CD3 scFv fused to an Fc region. Construct 11 comprises a first chain and a second chain. The first chain comprises, from the N-terminus to the C-terminus, CH2 and CH3. The second chain comprises, from the N-terminus to the C-terminus, anti-CD3 VH, (G4S)4 linker (SEQ ID NO: 29), anti-CD3 VL, (G4S) linker (SEQ ID NO: 768), CH2, and CH3.

[0175] Construct 12 comprises an anti-CD2 Fab fused to a first Fc region and an anti-CD3 scFv fused to a second Fc region. Construct 12 comprises a first chain, a second chain, and a third chain. The first chain comprises, from the N-terminus to the C-terminus, anti-CD2 VL and CL. The second chain comprises, from the N-terminus to the C-terminus, anti-CD2 VH, CH1, CH2, and CH3. The third chain comprises, from the N-terminus to the C-terminus, anti-CD3 VH, (G4S)4 linker (SEQ ID NO: 29), anti-CD3 VL, (G4S) linker (SEQ ID NO: 768), CH2, CH3, (G4S)3 linker (SEQ ID NO: 30), and Matrilin1. Construct 13 comprises an anti-CD28 Fab fused to a first Fc region and an anti-CD3 scFv fused to a second Fc region. Construct 13 comprises a first chain, a second chain, and a third chain. The first chain comprises, from the N-terminus to the C-terminus, anti-CD28 VL and CL. The second chain comprises, from the N-terminus to the C-terminus, anti-CD28 VH, CH1, CH2, and CH3. The third chain comprises, from the N-terminus to the C-terminus, anti-CD3 VH, (G4S)4 linker (SEQ ID NO: 29), anti-CD3 VL, (G4S) linker (SEQ ID NO: 768), CH2, CH3, (G4S)3 linker (SEQ ID NO: 30), and Matrilin1. Construct 14 comprises an anti-CD3 scFv fused to an Fc region. Construct 14 comprises a first chain and a second chain. The first chain comprises, from the N-terminus to the C-terminus, CH2 and CH3. The second chain comprises, from the N-terminus to the C-terminus, anti-CD3 VH, (G4S)4, linker (SEQ ID NO: 29), anti-CD3 VL, (G4S) linker (SEQ ID NO: 768), CH2, CH3, (G4S)3 linker (SEQ ID NO: 30), and Matrilin1.

[0176] Construct 15 comprises an anti-CD2 Fab fused to a first Fc region and an anti-CD3 scFv fused to a second Fc region. Construct 15 comprises a first chain, a second chain, and a third chain. The first chain comprises, from the N-terminus to the C-terminus, anti-CD2 VL and CL. The second chain comprises, from the N-terminus to the C-terminus, anti-CD2 VH, CH1, CH2, and CH3. The third chain comprises, from the N-terminus to the C-terminus, anti-CD3 VH, (G4S)4 linker (SEQ ID NO: 29), anti-CD3 VL, (G4S) linker (SEQ ID NO: 768), CH2, CH3, (G4S) linker (SEQ ID NO: 768), and the coiled-coil domain of cartilage oligomeric matrix protein (COMPcc). Construct 16 comprises an anti-CD28 Fab fused to a first Fc region and an anti-CD3 scFv fused to a second Fc region. Construct 16 comprises a first chain, a second chain, and a third chain. The first chain comprises, from the N-terminus to the C-terminus, anti-CD28 VL and CL. The second chain comprises, from the N-terminus to the C-terminus, anti-CD28 VH, CH1, CH2, and CH3. The third chain comprises, from the N-terminus to the C-terminus, anti-CD3 VH, (G4S)4 linker (SEQ ID NO: 29), anti-CD3 VL, (G4S) linker (SEQ ID NO: 768), CH2, CH3, (G4S) linker (SEQ ID NO: 768), and COMPcc.

[0177] Construct 17 comprises an anti-CD3 scFv fused to an Fc region. Construct 17 comprises a first chain and a second chain. The first chain comprises, from the N-terminus to the C-terminus, CH2 and CH3. The second chain comprises, from the N-terminus to the C-terminus, anti-CD3 VH, (G4S)4 linker (SEQ ID NO: 29), anti-CD3 VL, (G4S) linker (SEQ ID NO: 768), CH2, CH3, (G4S) linker (SEQ ID NO: 768), and COMPcc.

[0178] Exemplary sequences of Construct 1 to Construct 17 are provided in Table 20. Additional sequences (e.g., the anti-CD3 binders disclosed herein, the anti-CD28 binders disclosed herein, the anti-CD2 binders disclosed herein, or the Fc regions disclosed herein) can be used to generate Construct 1 to Construct 17.

[0179] FIGS. 49A-49B shows the binding information (FIG. 49A) and configuration (FIG. 49B) of second generation STARTERS molecules. “F5 ANTI-CD3 (2)” refers to an F5 construct with an anti-CD3 binder based on ANTI-CD3 (2).

[0180] FIGS. 50A-50B show the binder information (FIG. 50A) and configuration (FIG. 50B) of third generation STARTERS molecules.

[0181] FIG. 51A shows the configuration of the STARTERS molecule tested in Example J. FIGS. 51B and 51C show T cell activation and transduction mediated by MSP-lentivirus-STARTERS mixtures. The concentration of the STARTERS molecule in each dilution of the MSP-lentivirus-STARTERS mixture is shown on the x-axis. The formulations generated from both MSP batches yielded similar T cell activation (FIG. 51B) and transduction (FIG. 51C) efficiencies in vitro. Delivering the STARTERS molecule bound to MSPs (“Batch 1” and “Batch 2” in FIGS. 51B-C) enhanced activation and transduction as compared to soluble delivery of the STARTERS molecule (“No MSP” in FIGS. 51B-C). Day 1 in FIG. 51B and Day 4 in FIG. 51C refer to the time after the start of the T cell culture (i.e., when the cells and MSP-STARTERS-virus were initially mixed together).

[0182] FIGS. 52A and 52B show T cell activation and transduction mediated by MSP-lentivirus-STARTERS mixtures. GFP-encoding lentivirus and the STARTERS molecule were loaded onto full-size (“MSP”) or size-reduced MSPs, where size reduction was achieved using bead homogenization (“Bead homogenized”) or sonication (“Sonicated”) of MSPs. The ratio of lentivirus to T cells (MOI) in each dilution of the MSP-lentivirus-STARTERS mixture is shown on the x-axis. Size reduction of MSPs did not negatively impact in vitro potency with respect to T cell activation (FIG. 52A) and transduction (FIG. 52B). Both bead homogenization and sonication yielded comparable results to the full-sized MSPs.

[0183] FIGS. 53A and 53B show the design of the in vivo study. FIG. 53C is a correlation plot between CD19 CAR-T expansion and B cell depletion in the blood of mice at day 18 post-injectable 2 injection. FIG. 53D shows bioluminescence measurements of luciferase-expressing NALM6 tumors engrafted into NSG mice for 4 days, and then treated with a dose of 3e5 adoptively transferred CAR+ T cells from an initial cohort of mice undergoing the in vivo CART generation process. Images are from 13 days post-adoptive transfer. Mice were treated with a dose of 3e5 CAR-Ts manufactured using free virus (“Free virus”) or MSP-delivered virus (“MSP virus”). Also shown are control groups where tumors were treated with transferred PBMCs from donor mice with no CARTs (“PBMC control”) or where tumors were not untreated (“NALM6”). The mouse labeled “a” received 1.5e5 CAR+ cells from the free virus group. The mouse labeled “b” received 2.3e5 CAR+ cells from the free virus group. FIGS. 53E, 53F, and 53G are plots showing CART % of total T cells in circulation (FIG. 53E), the amount of CARTs in circulation (FIG. 53F), and the amount of circulating CD3+ T cells (FIG. 53G) 13 days after intradermal injection of injectable 2 at the cryogel site. FIGS. 53H, 53I, and 53J are plots of mice selected for circulating lymphocyte adoptive transfer into NALM6 challenged mice, showing the amount of circulating T cells (FIG. 53H), the amount of circulating CART cells (FIG. 53I), and CART % of total T cells in circulation (FIG. 53J) 18 days after intradermal injection of injectable 2. FIGS. 53K and 53L show results from combined flow cytometry analysis of blood from mice used for adoptive transfer and remaining mice enrolled in the study, showing the amount of circulating T cells (FIG. 53K) and the amount of CART cells in circulation (FIG. 53L) 18 or 19 days after intradermal injection of injectable 2. FIGS. 54A, 54B, 54C, and 54D are graphs showing in vitro release data. FIG. 54A shows data for H2a hydogel (200 kDa [HA-N₃]-24%; 9% crosslinked) and H4a hydrogel (700 kDa [HA-N₃]-16%; 18% crosslinked). FIG. 54B shows data for H4a hydrogel (700 kDa [HA-N₃]-16%; 18% crosslinked; no laponite), H5a hydrogel (700 kDa [HA-N₃]-16%; 18% crosslinked; 0.25 mg/ml laponite), and H6a hydrogel (700 kDa [HA-N₃]-16%; 18% crosslinked; 1 mg/ml laponite). FIG. 54C shows data for H5a hydrogel (in situ; 0.25 mg/ml laponite) and H5b hydrogel (particles; 0.25 mg/ml laponite). FIG. 54D shows data for H6a hydrogel (in situ; 1 mg/ml laponite) and H6b hydrogel (particles; 1 mg/ml laponite).

[0184] FIGS. 55A and 55B are graphs showing in vivo PD response at day 7.

### DETAILED DESCRIPTION

### Definitions

[0185] Unless defined otherwise, all technical and scientific terms used herein have the same meaning as commonly understood by one of ordinary skill in the art to which the invention pertains.

[0186] The term “a” and “an” refers to one or to more than one (i.e., to at least one) of the grammatical object of the article. By way of example, “an element” means one element or more than one element.

[0187] The term “about” when referring to a measurable value such as an amount, a temporal duration, and the like, is meant to encompass variations of 20% or in some instances ±10%, or in some instances ±5%, or in some instances+1%, or in some instances+0.1% from the specified value, as such variations are appropriate to perform the disclosed methods.

As used herein, the term “cell recruitment factor” refers to an agent capable of recruiting cells, for example immune cells. Non-limiting examples of such recruitment factors include IL-2, IL-7, CCL21, IL 5, GM-CSF, CCL19, CXCL9, CXCL10, XCL1, lymphotoxin alpha, lymphotoxin beta, and VEGF-C. Such factors are known to recruit immune cells, such as T-cells. Further non-limiting examples of cell recruitment factors that recruit specific cell types include skin homing chemokines such as but not limited to CCL17, CCL22, CCL20, and CCL27; myeloid cell chemoattractants such as but not limited to FLT3L, G-CSF, PDGF, S100A8/A9, CSF-1, CXCL8, CCL20, CCL17, CCR5, CCR6, CCL2, VEGF, Angiopoietin-2, CXCL12, PGE2, and LTB4; and NK-specific recruitment factors such as but not limited to CXC3L1, CCL19, CCL21, CXCL10, CXCL11, and CXCL12

[0188] As used herein, the term “cell activation agent” refers to an agent capable of activating a cell to perform a given function—for example, with T-cells, engagement of endogenous or engineered receptors (e.g., a CAR) or cell-surface markers activate T-cells to proliferate and, in certain cases, secrete appropriate cytokines.

[0189] The term “Chimeric Antigen Receptor” or alternatively a “CAR” refers to a recombinant polypeptide construct comprising at least an extracellular antigen binding domain, a transmembrane domain and a cytoplasmic signaling domain (also referred to herein as “an intracellular signaling domain”) comprising a functional signaling domain derived from a stimulatory molecule as defined below. In some embodiments, the domains in the CAR polypeptide construct are in the same polypeptide chain, e.g., comprise a chimeric fusion protein. In some embodiments, the domains in the CAR polypeptide construct are not contiguous with each other, e.g., are in different polypeptide chains, e.g., as provided in an RCAR as described herein.

[0190] In some aspects, the cytoplasmic signaling domain comprises a primary signaling domain (e.g., a primary signaling domain of CD3-zeta). In some aspects, the cytoplasmic signaling domain further comprises one or more functional signaling domains derived from at least one costimulatory molecule as defined below. In some aspects, the costimulatory molecule is chosen from 41BB (i.e., CD137), CD27, ICOS, and/or CD28. In some aspects, the CAR comprises a chimeric fusion protein comprising an extracellular antigen recognition domain, a transmembrane domain and an intracellular signaling domain comprising a functional signaling domain derived from a stimulatory molecule. In some aspects, the CAR comprises a chimeric fusion protein comprising an extracellular antigen recognition domain, a transmembrane domain and an intracellular signaling domain comprising a functional signaling domain derived from a co-stimulatory molecule and a functional signaling domain derived from a stimulatory molecule. In some aspects, the CAR comprises a chimeric fusion protein comprising an extracellular antigen recognition domain, a transmembrane domain and an intracellular signaling domain comprising two functional signaling domains derived from one or more co-stimulatory molecule(s) and a functional signaling domain derived from a stimulatory molecule. In some aspects, the CAR comprises a chimeric fusion protein comprising an extracellular antigen recognition domain, a transmembrane domain and an intracellular signaling domain comprising at least two functional signaling domains derived from one or more co-stimulatory molecule(s) and a functional signaling domain derived from a stimulatory molecule. In some aspects the CAR comprises an optional leader sequence at the amino-terminus (N-ter) of the CAR fusion protein. In some aspects, the CAR further comprises a leader sequence at the N-terminus of the extracellular antigen recognition domain, wherein the leader sequence is optionally cleaved from the antigen recognition domain (e.g., an scFv) during cellular processing and localization of the CAR to the cellular membrane.

[0191] A CAR that comprises an antigen binding domain (e.g., an scFv, a single domain antibody, or TCR (e.g., a TCR alpha binding domain or TCR beta binding domain)) that targets a specific tumor marker X, wherein X can be a tumor marker as described herein, is also referred to as XCAR. For example, a CAR that comprises an antigen binding domain that targets BCMA is referred to as BCMA CAR. The CAR can be expressed in any cell, e.g., an immune effector cell as described herein (e.g., a T cell or an NK cell).

[0192] The term “signaling domain” refers to the functional portion of a protein which acts by transmitting information within the cell to regulate cellular activity via defined signaling pathways by generating second messengers or functioning as effectors by responding to such messengers.

[0193] The term “antibody,” as used herein, refers to a protein, or polypeptide sequence derived from an immunoglobulin molecule which specifically binds with an antigen. Antibodies can be polyclonal or monoclonal, multiple or single chain, or intact immunoglobulins, and may be derived from natural sources or from recombinant sources. Antibodies can be tetramers of immunoglobulin molecules.

[0194] The term “antibody fragment” refers to at least one portion of an antibody, that retains the ability to specifically interact with (e.g., by binding, steric hindrance, stabilizing/destabilizing, spatial distribution) an epitope of an antigen. Examples of antibody fragments include, but are not limited to, Fab, Fab □F(ab)2, Fv fragments, scFv antibody fragments, disulfide-linked Fvs (sdFv), a Fd fragment consisting of the VH and CH1 domains, linear antibodies, single domain antibodies such as sdAb (either VL or VH), camelid VHH domains, multi-specific antibodies formed from antibody fragments such as a bivalent fragment comprising two Fab fragments linked by a disulfide bridge at the hinge region, and an isolated CDR or other epitope binding fragments of an antibody. An antigen binding fragment can also be incorporated into single domain antibodies, maxibodies, minibodies, nanobodies, intrabodies, diabodies, triabodies, tetrabodies, v-NAR and bis-scFv (see, e.g., Hollinger and Hudson, Nature Biotechnology 23:1126-1136, 2005). Antigen binding fragments can also be grafted into scaffolds based on polypeptides such as a fibronectin type III (Fn3) (see U.S. Pat. No. 6,703,199, which describes fibronectin polypeptide minibodies).

[0195] The portion of the CAR of the invention comprising an antibody or antibody fragment thereof may exist in a variety of forms where the antigen binding domain is expressed as part of a contiguous polypeptide chain including, for example, a single domain antibody fragment (sdAb), a single chain antibody (scFv), a humanized antibody or bispecific antibody (Harlow et al., 1999, In: Using Antibodies: A Laboratory Manual, Cold Spring Harbor Laboratory Press, NY; Harlow et al., 1989, In: Antibodies: A Laboratory Manual, Cold Spring Harbor, New York; Houston et al., 1988, Proc. Natl. Acad. Sci. USA 85:5879-5883; Bird et al., 1988, Science 242:423-426). In some aspects, the antigen binding domain of a CAR composition of the invention comprises an antibody fragment. In a further aspect, the CAR comprises an antibody fragment that comprises a scFv. The precise amino acid sequence boundaries of a given CDR can be determined using any of a number of well-known schemes, including those described by Kabat et al. (1991), “Sequences of Proteins of Immunological Interest,” 5th Ed. Public Health Service, National Institutes of Health, Bethesda, MD (“Kabat” numbering scheme), A1-Lazikani et al., (1997) JMB 273,927-948 (“Chothia” numbering scheme), or a combination thereof.

[0196] As used herein, the term “binding domain” or “antibody molecule” refers to a protein, e.g., an immunoglobulin chain or fragment thereof, comprising at least one immunoglobulin variable domain sequence. The term “binding domain” or “antibody molecule” encompasses antibodies and antibody fragments. In some embodiments, an antibody molecule is a multispecific antibody molecule, e.g., it comprises a plurality of immunoglobulin variable domain sequences, wherein a first immunoglobulin variable domain sequence of the plurality has binding specificity for a first epitope and a second immunoglobulin variable domain sequence of the plurality has binding specificity for a second epitope. In some embodiments, a multispecific antibody molecule is a bispecific antibody molecule. A bispecific antibody has specificity for no more than two antigens. A bispecific antibody molecule is characterized by a first immunoglobulin variable domain sequence which has binding specificity for a first epitope and a second immunoglobulin variable domain sequence that has binding specificity for a second epitope.

[0197] The terms “bispecific antibody” and “bispecific antibodies” refer to molecules that combine the antigen binding sites of two antibodies within a single molecule. Thus, a bispecific antibody is able to bind two different antigens simultaneously or sequentially. Methods for making bispecific antibodies are well known in the art. Various formats for combining two antibodies are also known in the art. Forms of bispecific antibodies of the invention include, but are not limited to, a diabody, a single-chain diabody, Fab dimerization (Fab-Fab), Fab-scFv, and a tandem antibody, as known to those of skill in the art.

[0198] The term “antibody heavy chain,” refers to the larger of the two types of polypeptide chains present in antibody molecules in their naturally occurring conformations, and which normally determines the class to which the antibody belongs.

[0199] The term “antibody light chain,” refers to the smaller of the two types of polypeptide chains present in antibody molecules in their naturally occurring conformations. Kappa (1) and lambda (k) light chains refer to the two major antibody light chain isotypes.

[0200] The term “recombinant antibody” refers to an antibody which is generated using recombinant DNA technology, such as, for example, an antibody expressed by a bacteriophage or yeast expression system. The term should also be construed to mean an antibody which has been generated by the synthesis of a DNA molecule encoding the antibody and which DNA molecule expresses an antibody protein, or an amino acid sequence specifying the antibody, wherein the DNA or amino acid sequence has been obtained using recombinant DNA or amino acid sequence technology which is available and well known in the art.

[0201] The term “antigen” or “Ag” refers to a molecule that provokes an immune response. This immune response may involve either antibody production, or the activation of specific immunologically competent cells, or both. The skilled artisan will understand that any macromolecule, including virtually all proteins or peptides, can serve as an antigen. Furthermore, antigens can be derived from recombinant or genomic DNA. A skilled artisan will understand that any DNA, which comprises a nucleotide sequences or a partial nucleotide sequence encoding a protein that elicits an immune response, therefore encodes an “antigen” as that term is used herein. Furthermore, one skilled in the art will understand that an antigen need not be encoded solely by a full-length nucleotide sequence of a gene. It is readily apparent that the present invention includes, but is not limited to, the use of partial nucleotide sequences of more than one gene and that these nucleotide sequences are arranged in various combinations to encode polypeptides that elicit the desired immune response. Moreover, a skilled artisan will understand that an antigen need not be encoded by a “gene” at all. It is readily apparent that an antigen can be synthesized or can be derived from a biological sample or might be a macromolecule besides a polypeptide. Such a biological sample can include, but is not limited to a tissue sample, a tumor sample, a cell or a fluid with other biological components.

[0202] The term “multispecific binding molecule” refers to a molecule that specifically binds to at least two antigens and comprise two or more antigen-binding domains. The antigen-binding domains can each independently be an antibody fragment (e.g., scFv, Fab, nanobody), a ligand, or a non-antibody derived binder (e.g., fibronectin, Fynomer, DARPin).

[0203] The term “monovalent” as used herein in the context of a multispecific binding molecule, antibody (e.g., bispecific antibody), or antibody fragment refers to a multispecific binding molecule, antibody (e.g., bispecific antibody), or antibody fragment in which there is a single antigen binding domain for each antigen to which the multispecific binding molecule, antibody (e.g., bispecific antibody), or antibody fragment binds.

[0204] The term “bivalent” as used herein in the context of a multispecific binding molecule, antibody (e.g., bispecific antibody), or antibody fragment refers to a multispecific binding molecule, antibody (e.g., bispecific antibody), or antibody fragment in which there is are two antigen binding domains for each antigen to which the multispecific binding molecule, antibody (e.g., bispecific antibody), or antibody fragment binds.

[0205] The term “multimer” refers to an aggregate of a plurality of molecules (such as but not limited to antibodies (e.g. bispecific antibodies), optionally conjugated to one another.

[0206] The term “anti-cancer effect” refers to a biological effect which can be manifested by various means, including but not limited to, e.g., a decrease in tumor volume, a decrease in the number of cancer cells, a decrease in the number of metastases, an increase in life expectancy, decrease in cancer cell proliferation, decrease in cancer cell survival, or amelioration of various physiological symptoms associated with the cancerous condition. An “anti-cancer effect” can also be manifested by the ability of the peptides, polynucleotides, cells and antibodies in prevention of the occurrence of cancer in the first place. The term “anti-tumor effect” refers to a biological effect which can be manifested by various means, including but not limited to, e.g., a decrease in tumor volume, a decrease in the number of tumor cells, a decrease in tumor cell proliferation, or a decrease in tumor cell survival.

[0207] The term “autologous” refers to any material derived from the same individual to whom it is later to be re-introduced into the individual.

[0208] The term “allogeneic” refers to any material derived from a different animal of the same species as the individual to whom the material is introduced. Two or more individuals are said to be allogeneic to one another when the genes at one or more loci are not identical. In some aspects, allogeneic material from individuals of the same species may be sufficiently unlike genetically to interact antigenically.

[0209] The term “xenogeneic” refers to a graft derived from an animal of a different species.

[0210] The term “cancer” refers to a disease characterized by the uncontrolled growth of aberrant cells. Cancer cells can spread locally or through the bloodstream and lymphatic system to other parts of the body. Examples of various cancers are described herein and include but are not limited to, breast cancer, prostate cancer, ovarian cancer, cervical cancer, skin cancer, pancreatic cancer, colorectal cancer, renal cancer, liver cancer, brain cancer, lymphoma, leukemia, lung cancer and the like. The terms “tumor” and “cancer” are used interchangeably herein, e.g., both terms encompass solid and liquid, e.g., diffuse or circulating, tumors. As used herein, the term “cancer” or “tumor” includes premalignant, as well as malignant cancers and tumors.

[0211] As described herein, “conjugated to” means associated with or attached to by any means as described herein, optionally covalently or non-covalently and/or directly or via linker.

[0212] “Derived from” as that term is used herein, indicates a relationship between a first and a second molecule. It generally refers to structural similarity between the first molecule and a second molecule and does not connotate or include a process or source limitation on a first molecule that is derived from a second molecule. For example, in the case of an intracellular signaling domain that is derived from a CD3zeta molecule, the intracellular signaling domain retains sufficient CD3zeta structure such that it has the required function, namely, the ability to generate a signal under the appropriate conditions. It does not connotate or include a limitation to a particular process of producing the intracellular signaling domain, e.g., it does not mean that, to provide the intracellular signaling domain, one must start with a CD3zeta sequence and delete unwanted sequence, or impose mutations, to arrive at the intracellular signaling domain.

[0213] The phrase “disease associated with expression of a tumor antigen as described herein” includes, but is not limited to, a disease associated with expression of a tumor antigen as described herein or condition associated with cells which express a tumor antigen as described herein including, e.g., proliferative diseases such as a cancer or malignancy or a precancerous condition such as a myelodysplasia, a myelodysplastic syndrome or a preleukemia; or a noncancer related indication associated with cells which express a tumor antigen as described herein. In some aspects, a cancer associated with expression of a tumor antigen as described herein is a hematological cancer. In some aspects, a cancer associated with expression of a tumor antigen as described herein is a solid cancer. Further diseases associated with expression of a tumor antigen described herein include, but not limited to, e.g., atypical and/or non-classical cancers, malignancies, precancerous conditions or proliferative diseases associated with expression of a tumor antigen as described herein. Non-cancer related indications associated with expression of a tumor antigen as described herein include, but are not limited to, e.g., autoimmune disease, (e.g., lupus), inflammatory disorders (allergy and asthma) and transplantation. In some embodiments, the tumor antigen-expressing cells express, or at any time expressed, mRNA encoding the tumor antigen. In some embodiments, the tumor antigen-expressing cells produce the tumor antigen protein (e.g., wild-type or mutant), and the tumor antigen protein may be present at normal levels or reduced levels. In some embodiments, the tumor antigen-expressing cells produced detectable levels of a tumor antigen protein at one point, and subsequently produced substantially no detectable tumor antigen protein.

[0214] The term “stimulation,” refers to a primary response induced by binding of a stimulatory molecule (e.g., a TCR/CD3 complex or CAR) with its cognate ligand (or tumor antigen in the case of a CAR) thereby mediating a signal transduction event, such as, but not limited to, signal transduction via the TCR/CD3 complex or signal transduction via the appropriate NK receptor or signaling domains of the CAR. Stimulation can mediate altered expression of certain molecules.

[0215] The term “stimulatory molecule,” refers to a molecule expressed by an immune cell (e.g., T cell, NK cell, B cell) that provides the cytoplasmic signaling sequence(s) that regulate activation of the immune cell in a stimulatory way for at least some aspect of the immune cell signaling pathway. In some aspects, the-signal is a primary signal that is initiated by, for instance, binding of a TCR/CD3 complex with an MHC molecule loaded with peptide, and which leads to mediation of a T cell response, including, but not limited to, proliferation, activation, differentiation, and the like. A primary cytoplasmic signaling sequence (also referred to as a “primary signaling domain”) that acts in a stimulatory manner may contain a signaling motif which is known as immunoreceptor tyrosine-based activation motif or ITAM. Examples of an ITAM containing-cytoplasmic signaling sequence that is of particular use in the invention include, but are not limited to, those derived from CD3 zeta, common FcR gamma (FCER1G), Fc gamma RIIa, FcR beta (Fc Epsilon Rib), CD3 gamma, CD3 delta, CD3 epsilon, CD79a, CD79b, DAP10, and DAP12. In a specific CAR of the invention, the intracellular signaling domain in any one or more CARS of the invention comprises an intracellular signaling sequence, e.g., a primary signaling sequence of CD3-zeta. In a specific CAR of the invention, the primary signaling sequence of CD3-zeta is a sequence provided as SEQ ID NO: 18, or the equivalent residues from a non-human species, e.g., mouse, rodent, monkey, ape and the like. In a specific CAR of the invention, the primary signaling sequence of CD3-zeta is the sequence as provided in SEQ ID NO:20, or the equivalent residues from a non-human species, e.g., mouse, rodent, monkey, ape, and the like.

[0216] The term “Fc silent” refers to an Fc domain that has been modified to have minimal interaction with effector cells. Silenced effector functions may be obtained by mutation in the Fc region of the antibodies and have been described in the art, such as, but not limited to, LALA and N297A (Strohl, W., 2009, Curr. Opin. Biotechnol. vol. 20(6):685-691); and D265A (Baudino et al., 2008, J. Immunol. 181: 6664-69) see also Heusser et al., WO2012065950. Examples of Fc silencing mutations include the LALA mutant comprising L234A and L235A mutation in the IgG1 Fc amino acid sequence, DAPA (D265A, P329A) (see, e.g., U.S. Pat. No. 6,737,056), N297A, DANAPA (D265A, N297A, and P329A), and/or LALADANAPS (L234A, L235A, D265A, N297A and P331S), numbered according to the Eu numbering system. Further, non-limiting exemplary embodiments of silencing mutations include LALAGA (L234A, L235A, and G237A), LALASKPA (L234A, L235A, S267K, and P329A), DAPASK (D265A, P329A, and S267K), GADAPA (G237A, D265A, and P329A), GADAPASK (G237A, D265A, P329A, and S267K), LALAPG (L234A, L235A, and P329G), and LALAPA (L234A, L235A, and P329A), numbered according to the Eu numbering system. Unless otherwise specified herein, numbering of amino acid residues in the Fc region or constant region is according to the Eu numbering system, also called the Eu index, as described in Kabat, et al., Sequences of Proteins of Immunological Interest, 5th Ed. Public Health Service, National Institutes of Health, Bethesda, Md. (1991).

[0217] The term “CD3/TCR complex” refers to a complex on the T-cell surface comprising a TCR with including a TCR alpha and TCR beta chain; CD3 including one CD3 gamma chain, one CD3 delta chain, and two CD3 epsilon chains; and a zeta domain. UniProt accession numbers P01848 (TCR alpha, constant domain), P01850 (TCR beta, constant domain 1), A0A5B9 (TCR beta, constant domain 2), P09693 (CD3 gamma), P04234 (CD3 delta), P07766 (CD3 epsilon) provide exemplary human sequences for these chains, with the exception of the zeta chain, responsible for intracellular signaling, which is discussed in further detail below. Further relevant accession numbers include A0A075B662 (murine TCR alpha, constant domain), A0A0A6YWV4 and/or A0A075B5J3 (murine TCR beta, constant domain 1), A0A075B5J4 (murine TCR beta, constant domain 2), P11942 (murine CD3 gamma), P04235 (murine CD3 delta), P22646 (murine CD3 epsilon).

[0218] The term “CD28” refers to a T-cell specific glycoprotein CD28, also referred to as Tp44, as well as all alternate names thereof, which functions as a costimulatory molecule. UniProt accession number P10747 provides exemplary human CD28 amino acid sequences (see also HGNC: 1653, Entrez Gene: 940, Ensembl: ENSG00000178562, and OMIM: 186760). Further relevant CD28 sequences include UniProt accession number P21041 (murine CD28).

[0219] The term “ICOS” refers to inducible T-cell costimulator, also referred to as AILIM, CVID1, CD278, as well as all alternate names thereof, which functions as a costimulatory molecule. UniProt accession number Q9Y6W8 provides exemplary human ICOS amino acid sequences (see also HGNC: 5351, Entrez Gene: 29851, Ensembl: ENSG00000163600, and OMIM: 604558). Further relevant ICOS sequences include UniProt accession number Q9WVS0 (murine ICOS).

[0220] The term “CD27” refers to T-cell activation antigen CD27, Tumor necrosis factor receptor superfamily member 7, T14, T-cell activation antigen S152, Tp55, as well as alternate names thereof, which functions as a costimulatory molecule. UniProt accession number P26842 provides exemplary human CD27 amino acid sequences (see also HGNC: 11922, Entrez Gene: 939, Ensembl: ENSG00000139193, and OMIM: 186711). Further relevant CD27 sequences include UniProt accession number P41272 (murine CD27). The term “CD25” refers to IL-2 subunit alpha, TAC antigen, p55, insulin dependent diabetes mellitus 10, EID21, P55, TCGFR, as well as alternate names thereof, which functions as a growth factor receptor. UniProt accession number P01589 provides exemplary human CD25 amino acid sequences (see also HGNC: 6008, Entrez Gene: 3559, Ensembl: ENSG00000134460, and OMIM: 147730). Further relevant CD25 sequences include UniProt accession number P01590 (murine CD25).

[0221] The term “4-1BB” refers to CD137 or Tumor necrosis factor receptor superfamily member 9, as well as alternate names thereof, which functions as a costimulatory molecule. UniProt accession number Q07011 provides exemplary human 4-1BB amino acid sequences (see also HGNC: 11924, Entrez Gene: 3604, Ensembl: ENSG00000049249, and OMIM: 602250). Further relevant 4-1BB sequences include UniProt accession number P20334 (murine 4-1BB).

[0222] The term “IL6RA” refers to IL-6 receptor subunit alpha or CD126, as well as alternate names thereof, which functions as a growth factor receptor. UniProt accession number P08887 provides exemplary human IL6RA amino acid sequences (see also HGNC: 6019, Entrez Gene: 3570, Ensembl: ENSG00000160712, and OMIM: 147880 Further relevant IL6RA sequences include UniProt accession number P22272 (murine IL6RA).

[0223] The term “IL6RB” refers to IL-6 receptor subunit beta or CD130, as well as alternate names thereof, which functions as a growth factor receptor. UniProt accession number P40189 provides exemplary human IL6RB amino acid sequences. Further relevant IL6RB sequences include UniProt accession number Q00560 (murine IL6RB). The term “CD2” refers to T-cell surface antigen T11/Leu-5/CD2, lymphocyte function antigen 2, T11, or erythrocyte/rosette/LFA-3 receptor, as well as alternate names thereof, which functions as a growth factor receptor. UniProt accession number P06729 provides exemplary human CD2 amino acid sequences (see also HGNC: 1639, Entrez Gene: 914, Ensembl: ENSG00000116824, and OMIM: 186990). Further relevant CD2 sequences include UniProt accession number P08920 (murine CD2).

[0224] The term “antigen presenting cell” or “APC” refers to an immune system cell such as an accessory cell (e.g., a B-cell, a dendritic cell, and the like) that displays a foreign antigen complexed with major histocompatibility complexes (MHC ©) on its surface. T-cells may recognize these complexes using their T-cell receptors (TCRs). APCs process antigens and present them to T-cells.

[0225] An “intracellular signaling domain,” as the term is used herein, refers to an intracellular portion of a molecule. The intracellular signaling domain generates a signal that promotes an immune effector function of the CAR containing cell, e.g., a CART cell. Examples of immune effector function, e.g., in a CART cell, include cytolytic activity and helper activity, including the secretion of cytokines.

[0226] In some embodiments, the intracellular signaling domain can comprise a primary intracellular signaling domain. Exemplary primary intracellular signaling domains include those derived from the molecules responsible for primary stimulation, or antigen dependent simulation. In some embodiments, the intracellular signaling domain can comprise a costimulatory intracellular domain. Exemplary costimulatory intracellular signaling domains include those derived from molecules responsible for costimulatory signals, or antigen independent stimulation. For example, in the case of a CART, a primary intracellular signaling domain can comprise a cytoplasmic sequence of a T cell receptor, and a costimulatory intracellular signaling domain can comprise cytoplasmic sequence from co-receptor or costimulatory molecule.

[0227] A primary intracellular signaling domain can comprise a signaling motif which is known as an immunoreceptor tyrosine-based activation motif or ITAM. Examples of ITAM containing primary cytoplasmic signaling sequences include, but are not limited to, those derived from CD3 zeta, common FcR gamma (FCER1G), Fc gamma RIIa, FcR beta (Fc Epsilon Rib), CD3 gamma, CD3 delta, CD3 epsilon, CD79a, CD79b, DAP10, and DAP12.

[0228] The term “zeta” or alternatively “zeta chain”, “CD3-zeta” or “TCR-zeta” refers to CD247. Swiss-Prot accession number P20963 provides exemplary human CD3 zeta amino acid sequences. A “zeta stimulatory domain” or alternatively a “CD3-zeta stimulatory domain” or a “TCR-zeta stimulatory domain” refers to a stimulatory domain of CD3-zeta or a variant thereof (e.g., a molecule having mutations, e.g., point mutations, fragments, insertions, or deletions). In some embodiments, the cytoplasmic domain of zeta comprises residues 52 through 164 of GenBank Acc. No. BAG36664.1 or a variant thereof (e.g., a molecule having mutations, e.g., point mutations, fragments, insertions, or deletions). In some embodiments, the “zeta stimulatory domain” or a “CD3-zeta stimulatory domain” is a sequence provided as SEQ ID NO: 9 or 10, or a variant thereof (e.g., a molecule having mutations, e.g., point mutations, fragments, insertions, or deletions). Alternatively or in addition, the term “zeta” or alternatively “zeta chain”, “CD3-zeta” (or “CD3zeta, CD3 zeta or CD3z) or “TCR-zeta” is defined as the protein provided as GenBan Acc. No. BAG36664.1, or the equivalent residues from a non-human species, e.g., mouse, rodent, monkey, ape and the like, and a “zeta stimulatory domain” or alternatively a “CD3-zeta stimulatory domain” or a “TCR-zeta stimulatory domain” is defined as the amino acid residues from the cytoplasmic domain of the zeta chain, or functional derivatives thereof, that are sufficient to functionally transmit an initial signal necessary for T cell activation. In some aspects the cytoplasmic domain of zeta comprises residues 52 through 164 of GenBank Acc. No. BAG36664.1 or the equivalent residues from a non-human species, e.g., mouse, rodent, monkey, ape and the like, that are functional orthologs thereof In some aspects, the “zeta stimulatory domain” or a “CD3-zeta stimulatory domain” is a sequence provided as SEQ ID NO:18. In some aspects, the “zeta stimulatory domain” or a “CD3-zeta stimulatory domain” is a sequence provided as SEQ ID NO:20.

[0229] The term a “costimulatory molecule” refers to a cognate binding partner on a T cell that specifically binds with a costimulatory ligand, thereby mediating a costimulatory response by the T cell, such as, but not limited to, proliferation. Costimulatory molecules are cell surface molecules other than antigen receptors or their ligands that are contribute to an efficient immune response. Costimulatory molecules include, but are not limited to, an MHC class I molecule, BTLA and a Toll ligand receptor, as well as OX40, CD27, CD28, CDS, ICAM-1, LFA-1 (CD11a/CD18), ICOS (CD278), and 4-1BB (CD137). Further examples of such costimulatory molecules include CDS, ICAM-1, GITR, BAFFR, HVEM (LIGHTR), SLAMF7, NKp80 (KLRF1), NKp44, NKp30, NKp46, CD160, CD19, CD4, CD8alpha, CD8beta, IL2R beta, IL2R gamma, IL7R alpha, ITGA4, VLA1, CD49a, ITGA4, IA4, CD49D, ITGA6, VLA-6, CD49f, ITGAD, CD11d, ITGAE, CD103, ITGAL, CD11a, LFA-1, ITGAM, CD11b, ITGAX, CD11c, ITGB1, CD29, ITGB2, CD18, LFA-1, ITGB7, NKG2D, NKG2C, TNFR2, TRANCE/RANKL, DNAM1 (CD226), SLAMF4 (CD244, 2B4), CD84, CD96 (Tactile), CEACAM1, CRTAM, Ly9 (CD229), CD160 (BY55), PSGL1, CD100 (SEMA4D), CD69, SLAMF6 (NTB-A, Ly108), SLAM (SLAMF1, CD150, IPO-3), BLAME (SLAMF8), SELPLG (CD162), LTBR, LAT, GADS, SLP-76, PAG/Cbp, CD19a, and a ligand that specifically binds with CD83.

[0230] A costimulatory intracellular signaling domain can be the intracellular portion of a costimulatory molecule. A costimulatory molecule can be represented in the following protein families: TNF receptor proteins, Immunoglobulin-like proteins, cytokine receptors, integrins, signaling lymphocytic activation molecules (SLAM proteins), and activating NK cell receptors. Examples of such molecules include CD27, CD28, 4-1BB (CD137), OX40, GITR, CD30, CD40, ICOS, BAFFR, HVEM, ICAM-1, lymphocyte function-associated antigen-1 (LFA-1), CD2, CDS, CD7, CD287, LIGHT, NKG2C, NKG2D, SLAMF7, NKp80, NKp30, NKp44, NKp46, CD160, B7-H3, and a ligand that specifically binds with CD83, and the like. The intracellular signaling domain can comprise the entire intracellular portion, or the entire native intracellular signaling domain, of the molecule from which it is derived, or a functional fragment or derivative thereof.

[0231] “Immune effector cell,” as that term is used herein, refers to a cell that is involved in an immune response, e.g., in the promotion of an immune effector response. Examples of immune effector cells include T cells, e.g., alpha/beta T cells and gamma/delta T cells, B cells, natural killer (NK) cells, natural killer T (NKT) cells, mast cells, and myeloid-derived phagocytes. “Immune effector function or immune effector response,” as that term is used herein, refers to function or response, e.g., of an immune effector cell, that enhances or promotes an immune attack of a target cell. E.g., an immune effector function or response refers a property of a T or NK cell that promotes killing or inhibition of growth or proliferation, of a target cell. In the case of a T cell, primary stimulation and co-stimulation are examples of immune effector function or response.

[0232] The term “encoding” or “encode” refers to the inherent property of specific sequences of nucleotides in a polynucleotide, such as a gene, a cDNA, or an mRNA, to serve as templates for synthesis of other polymers and macromolecules in biological processes having either a defined sequence of nucleotides (e.g., rRNA, tRNA and mRNA) or a defined sequence of amino acids and the biological properties resulting therefrom. Thus, a gene, cDNA, or RNA, encodes a protein if transcription and translation of mRNA corresponding to that gene produces the protein in a cell or other biological system. Both the coding strand, the nucleotide sequence of which is identical to the mRNA sequence and is usually provided in sequence listings, and the non-coding strand, used as the template for transcription of a gene or cDNA, can be referred to as encoding the protein or other product of that gene or cDNA.

[0233] Unless otherwise specified, a “nucleotide sequence encoding an amino acid sequence” includes all nucleotide sequences that are degenerate versions of each other and that encode the same amino acid sequence. The phrase nucleotide sequence that encodes a protein or a RNA may also include introns to the extent that the nucleotide sequence encoding the protein may in some version contain an intron(s).

[0234] The term “effective amount” or “therapeutically effective amount” are used interchangeably herein, and refer to an amount of a compound, formulation, material, or composition, as described herein effective to achieve a particular biological result. The term “endogenous” refers to any material from or produced inside an organism, cell, tissue or system.

[0235] The term “exogenous” refers to any material introduced from or produced outside an organism, cell, tissue or system.

[0236] The term “expression” refers to the transcription and/or translation of a particular nucleotide sequence driven by a promoter.

[0237] As used herein the term “extended release agent” refers to an agent that releases a given composition, e.g., a viral vector (e.g., a lentiviral vector) and/or a cell activation agent, over a longer period of time than a comparable immediate release formulation. In some embodiments, the extended release agent is formulated for administration by injection.

[0238] The term “transfer vector” refers to a composition of matter which comprises an isolated nucleic acid and which can be used to deliver the isolated nucleic acid to the interior of a cell. Numerous vectors are known in the art including, but not limited to, linear polynucleotides, polynucleotides associated with ionic or amphiphilic compounds, plasmids, and viruses. Thus, the term “transfer vector” includes an autonomously replicating plasmid or a virus. The term should also be construed to further include non-plasmid and non-viral compounds which facilitate transfer of nucleic acid into cells, such as, for example, a polylysine compound, liposome, and the like. Examples of viral transfer vectors include, but are not limited to, adenoviral vectors, adeno-associated virus vectors, retroviral vectors, lentiviral vectors, and the like.

[0239] The term “expression vector” refers to a vector comprising a recombinant polynucleotide comprising an expression control sequence operatively linked to a nucleotide sequence to be expressed. An expression vector comprises sufficient cis-acting elements for expression; other elements for expression can be supplied by the host cell or in an in vitro expression system. Expression vectors include all those known in the art, including cosmids, plasmids (e.g., naked or contained in liposomes) and viruses (e.g., lentiviruses, retroviruses, adenoviruses, and adeno-associated viruses, “viral vectors”) that incorporate the recombinant polynucleotide.

[0240] The term “lentivirus” refers to a genus of the Retroviridae family. Lentiviruses are unique among the retroviruses in being able to infect non-dividing cells; they can deliver a significant amount of genetic information into the DNA of the host cell, so they are one of the most efficient methods of a gene delivery vector. HIV, SIV, and FIV are all examples of lentiviruses.

[0241] The term “lentiviral vector” refers to a vector derived from at least a portion of a lentivirus genome, including especially a self-inactivating lentiviral vector as provided in Milone et al., Mol. Ther. 17(8): 1453-1464 (2009). Other examples of lentivirus vectors that may be used in the clinic, include but are not limited to, e.g., the LENTIVECTOR® gene delivery technology from Oxford BioMedica, the LENTIMAX™ vector system from Lentigen and the like. Nonclinical types of lentiviral vectors are also available and would be known to one skilled in the art.

[0242] The term “homologous” or “identity” refers to the subunit sequence identity between two polymeric molecules, e.g., between two nucleic acid molecules, such as, two DNA molecules or two RNA molecules, or between two polypeptide molecules. When a subunit position in both of the two molecules is occupied by the same monomeric subunit; e.g., if a position in each of two DNA molecules is occupied by adenine, then they are homologous or identical at that position. The homology between two sequences is a direct function of the number of matching or homologous positions; e.g., if half (e.g., five positions in a polymer ten subunits in length) of the positions in two sequences are homologous, the two sequences are 50% homologous; if 90% of the positions (e.g., 9 of 10), are matched or homologous, the two sequences are 90% homologous.

[0243] “Humanized” forms of non-human (e.g., murine) antibodies are chimeric immunoglobulins, immunoglobulin chains or fragments thereof (such as Fv, Fab, Fab QF(ab, or other antigen-binding subsequences of antibodies) which contain minimal sequence derived from non-human immunoglobulin. For the most part, humanized antibodies and antibody fragments thereof are human immunoglobulins (recipient antibody or antibody fragment) in which residues from a complementary-determining region (CDR) of the recipient are replaced by residues from a CDR of a non-human species (donor antibody) such as mouse, rat or rabbit having the desired specificity, affinity, and capacity. In some instances, Fv framework region (FR) residues of the human immunoglobulin are replaced by corresponding non-human residues. Furthermore, a humanized antibody/antibody fragment can comprise residues which are found neither in the recipient antibody nor in the imported CDR or framework sequences. These modifications can further refine and optimize antibody or antibody fragment performance. In general, the humanized antibody or antibody fragment thereof will comprise substantially all of at least one, and typically two, variable domains, in which all or substantially all of the CDR regions correspond to those of a non-human immunoglobulin and all or a significant portion of the FR regions are those of a human immunoglobulin sequence. The humanized antibody or antibody fragment can also comprise at least a portion of an immunoglobulin constant region (Fc), typically that of a human immunoglobulin. For further details, see Jones et al., Nature, 321: 522-525, 1986; Reichmann et al., Nature, 332: 323-329, 1988; Presta, Curr. Op. Struct. Biol., 2: 593-596, 1992.

[0244] “Fully human” refers to an immunoglobulin, such as an antibody or antibody fragment, where the whole molecule is of human origin or consists of an amino acid sequence identical to a human form of the antibody or immunoglobulin.

[0245] The term “isolated” means altered or removed from the natural state. For example, a nucleic acid or a peptide naturally present in a living animal is not “isolated,” but the same nucleic acid or peptide partially or completely separated from the coexisting materials of its natural state is “isolated.” An isolated nucleic acid or protein can exist in substantially purified form, or can exist in a non-native environment such as, for example, a host cell.

[0246] The term “operably linked” or “transcriptional control” refers to functional linkage between a regulatory sequence and a heterologous nucleic acid sequence resulting in expression of the latter. For example, a first nucleic acid sequence is operably linked with a second nucleic acid sequence when the first nucleic acid sequence is placed in a functional relationship with the second nucleic acid sequence. For instance, a promoter is operably linked to a coding sequence if the promoter affects the transcription or expression of the coding sequence. Operably linked DNA sequences can be contiguous with each other and, e.g., where necessary to join two protein coding regions, are in the same reading frame.

[0247] The term “nucleic acid” or “polynucleotide” refers to deoxyribonucleic acids (DNA) or ribonucleic acids (RNA) and polymers thereof in either single- or double-stranded form. Unless specifically limited, the term encompasses nucleic acids containing known analogues of natural nucleotides that have similar binding properties as the reference nucleic acid and are metabolized in a manner similar to naturally occurring nucleotides. Unless otherwise indicated, a particular nucleic acid sequence also implicitly encompasses conservatively modified variants thereof (e.g., degenerate codon substitutions), alleles, orthologs, SNPs, and complementary sequences as well as the sequence explicitly indicated. Specifically, degenerate codon substitutions may be achieved by generating sequences in which the third position of one or more selected (or all) codons is substituted with mixed-base and/or deoxyinosine residues (Batzer et al., Nucleic Acid Res. 19:5081 (1991); Ohtsuka et al., J. Biol. Chem. 260:2605-2608 (1985); and Rossolini et al., Mol. Cell. Probes 8:91-98 (1994)).

[0248] The terms “peptide,” “polypeptide,” and “protein” are used interchangeably, and refer to a compound comprised of amino acid residues covalently linked by peptide bonds. A protein or peptide must contain at least two amino acids, and no limitation is placed on the maximum number of amino acids that can comprise a protein's or peptide's sequence. Polypeptides include any peptide or protein comprising two or more amino acids joined to each other by peptide bonds. As used herein, the term refers to both short chains, which also commonly are referred to in the art as peptides, oligopeptides and oligomers, for example, and to longer chains, which generally are referred to in the art as proteins, of which there are many types. “Polypeptides” include, for example, biologically active fragments, substantially homologous polypeptides, oligopeptides, homodimers, heterodimers, variants of polypeptides, modified polypeptides, derivatives, analogs, fusion proteins, among others. A polypeptide includes a natural peptide, a recombinant peptide, or a combination thereof.

[0249] The term “promoter” refers to a DNA sequence recognized by the synthetic machinery of the cell, or introduced synthetic machinery, required to initiate the specific transcription of a polynucleotide sequence.

[0250] The term “promoter/regulatory sequence” refers to a nucleic acid sequence which is required for expression of a gene product operably linked to the promoter/regulatory sequence. In some instances, this sequence may be the core promoter sequence and in other instances, this sequence may also include an enhancer sequence and other regulatory elements which are required for expression of the gene product. The promoter/regulatory sequence may, for example, be one which expresses the gene product in a tissue specific manner.

[0251] The term “constitutive promoter” refers to a nucleotide sequence which, when operably linked with a polynucleotide which encodes or specifies a gene product, causes the gene product to be produced in a cell under most or all physiological conditions of the cell.

[0252] The term “inducible promoter” refers to a nucleotide sequence which, when operably linked with a polynucleotide which encodes or specifies a gene product, causes the gene product to be produced in a cell substantially only when an inducer which corresponds to the promoter is present in the cell.

[0253] The term “tissue-specific promoter” refers to a nucleotide sequence which, when operably linked with a polynucleotide encodes or specified by a gene, causes the gene product to be produced in a cell substantially only if the cell is a cell of the tissue type corresponding to the promoter.

[0254] The terms “cancer associated antigen” or “tumor antigen” interchangeably refers to a molecule (typically a protein, carbohydrate or lipid) that is expressed on the surface of a cancer cell, either entirely or as a fragment (e.g., MHC/peptide), and which is useful for the preferential targeting of a pharmacological agent to the cancer cell. In some embodiments, a tumor antigen is a marker expressed by both normal cells and cancer cells, e.g., a lineage marker, e.g., CD19 on B cells. In some embodiments, a tumor antigen is a cell surface molecule that is overexpressed in a cancer cell in comparison to a normal cell, for instance, 1-fold over expression, 2-fold overexpression, 3-fold overexpression or more in comparison to a normal cell. In some embodiments, a tumor antigen is a cell surface molecule that is inappropriately synthesized in the cancer cell, for instance, a molecule that contains deletions, additions or mutations in comparison to the molecule expressed on a normal cell. In some embodiments, a tumor antigen will be expressed exclusively on the cell surface of a cancer cell, entirely or as a fragment (e.g., MHC/peptide), and not synthesized or expressed on the surface of a normal cell. In some embodiments, the CARs of the present invention include CARs comprising an antigen binding domain (e.g., antibody or antibody fragment) that binds to a MHC presented peptide. Normally, peptides derived from endogenous proteins fill the pockets of Major histocompatibility complex (MHC) class I molecules and are recognized by T cell receptors (TCRs) on CD8+ T lymphocytes. The MHC class I complexes are constitutively expressed by all nucleated cells. In cancer, virus-specific and/or tumor-specific peptide/MHC complexes represent a unique class of cell surface targets for immunotherapy. TCR-like antibodies targeting peptides derived from viral or tumor antigens in the context of human leukocyte antigen (HLA)-A1 or HLA-A2 have been described (see, e.g., Sastry et al., J Virol. 2011 85(5):1935-1942; Sergeeva et al., Blood, 2011 117(16):4262-4272; Verma et al., J Immunol 2010 184(4):2156-2165; Willemsen et al., Gene Ther 2001 8(21):1601-1608; Dao et al., Sci Transl Med 2013 5(176):176ra33; Tassev et al., Cancer Gene Ther 2012 19(2):84-100). For example, TCR-like antibody can be identified from screening a library, such as a human scFv phage displayed library.

[0255] The term “tumor-supporting antigen” or “cancer-supporting antigen” interchangeably refer to a molecule (typically a protein, carbohydrate or lipid) that is expressed on the surface of a cell that is, itself, not cancerous, but supports the cancer cells, e.g., by promoting their growth or survival e.g., resistance to immune cells. Exemplary cells of this type include stromal cells and myeloid-derived suppressor cells (MDSCs). The tumor-supporting antigen itself need not play a role in supporting the tumor cells so long as the antigen is present on a cell that supports cancer cells.

[0256] As used herein, “in vitro transcribed RNA” refers to RNA, preferably mRNA, that has been synthesized in vitro. Generally, the in vitro transcribed RNA is generated from an in vitro transcription vector. The in vitro transcription vector comprises a template that is used to generate the in vitro transcribed RNA.

[0257] As used herein, a “poly(A)” is a series of adenosines attached by polyadenylation to the mRNA. In a preferred embodiment of a construct for transient expression, the polyA is between 50 and 5000 (SEQ ID NO: 34), preferably greater than 64, more preferably greater than 100, most preferably greater than 300 or 400. poly(A) sequences can be modified chemically or enzymatically to modulate mRNA functionality such as localization, stability or efficiency of translation.

[0258] As used herein in connection with expression, e.g., expression of a CAR molecule, “transient” refers to expression of a non-integrated transgene for a period of hours, days or weeks, wherein the period of time of expression is less than the period of time for expression of the gene if integrated into the genome or contained within a stable plasmid replicon in the host cell.

[0259] As used herein, the terms “treat”, “treatment” and “treating” refer to the reduction or amelioration of the progression, severity and/or duration of a proliferative disorder, or the amelioration of one or more symptoms (preferably, one or more discernible symptoms) of a proliferative disorder resulting from the administration of one or more therapies (e.g., one or more therapeutic agents such as a CAR of the invention). In specific embodiments, the terms “treat”, “treatment” and “treating” refer to the amelioration of at least one measurable physical parameter of a proliferative disorder, such as growth of a tumor, not necessarily discernible by the patient. In other embodiments the terms “treat”, “treatment” and “treating”-refer to the inhibition of the progression of a proliferative disorder, either physically by, e.g., stabilization of a discernible symptom, physiologically by, e.g., stabilization of a physical parameter, or both. In other embodiments the terms “treat”, “treatment” and “treating” refer to the reduction or stabilization of tumor size or cancerous cell count.

[0260] The term “signal transduction pathway” refers to the biochemical relationship between a variety of signal transduction molecules that play a role in the transmission of a signal from one portion of a cell to another portion of a cell. The phrase “cell surface receptor” includes molecules and complexes of molecules capable of receiving a signal and transmitting signal across the membrane of a cell.

[0261] The term “subject” is intended to include living organisms in which an immune response can be elicited (e.g., mammals, human).

[0262] The term, a “substantially purified” cell refers to a cell that is essentially free of other cell types. A substantially purified cell also refers to a cell which has been separated from other cell types with which it is normally associated in its naturally occurring state. In some instances, a population of substantially purified cells refers to a homogenous population of cells. In other instances, this term refers simply to cell that have been separated from the cells with which they are naturally associated in their natural state. In some aspects, the cells are cultured in vitro. In other aspects, the cells are not cultured in vitro.

[0263] The term “therapeutic” as used herein means a treatment. A therapeutic effect is obtained by reduction, suppression, remission, or eradication of a disease state.

[0264] The term “prophylaxis” as used herein means the prevention of or protective treatment for a disease or disease state.

[0265] The term “transfected” or “transformed” or “transduced” refers to a process by which exogenous nucleic acid is transferred or introduced into the host cell. A “transfected” or “transformed” or “transduced” cell is one which has been transfected, transformed or transduced with exogenous nucleic acid. The cell includes the primary subject cell and its progeny.

[0266] The term “specifically binds,” refers to an antibody, or a ligand, which recognizes and binds with a binding partner (e.g., a tumor antigen) protein present in a sample, but which antibody or ligand does not substantially recognize or bind other molecules in the sample.

[0267] “Refractory” as used herein refers to a disease, e.g., cancer, that does not respond to a treatment. In embodiments, a refractory cancer can be resistant to a treatment before or at the beginning of the treatment. In other embodiments, the refractory cancer can become resistant during a treatment. A refractory cancer is also called a resistant cancer.

[0268] “Relapsed” as used herein refers to the return of a disease (e.g., cancer) or the signs and symptoms of a disease such as cancer after a period of improvement, e.g., after prior treatment of a therapy, e.g., cancer therapy

[0269] A “system” as the term is used herein in connection with, for example, gene editing, refers to a group of molecules, e.g., one or more molecules, which together act to produce a desired function.

[0270] A “gene editing system” as the term is used herein, refers to a system, e.g., one or more molecules, that direct and effect an alteration, e.g., a deletion, of one or more nucleic acids at or near a site of genomic DNA targeted by said system. Gene editing systems are known in the art, and are described more fully below.

[0271] A “dominant negative” gene product or protein is one that interferes with the function of a gene product or protein. The gene product affected can be the same or different from the dominant negative protein. Dominant negative gene products can be of many forms, including truncations, full length proteins with point mutations or fragments thereof, or fusions of full-length wild type or mutant proteins or fragments thereof with other proteins. The level of inhibition observed can be very low. For example, it may require a large excess of the dominant negative protein compared to the functional protein or proteins involved in a process in order to see an effect. It may be difficult to see effects under normal biological assay conditions.

[0272] The term “proportion” refers to the ratio of the specified molecule to the total number of molecules in a population. In an exemplary embodiment, a proportion of T cells having a specific phenotype (e.g., T_{SCM} cells) refers to the ratio of the number of T cells having that phenotype relative to the total number of T cells in a population. In an exemplary embodiment, a proportion of T cells having a specific phenotype (e.g., CD45RA+CD62L+ cells) refers to the ratio of the number of T cells having that phenotype relative to the total number of T cells in a population. It will be understood that such proportions may be measured against certain subsets of cells, where indicted. For example, the proportion of CD4+ T_{SCM} cells may be measured against the total number of CD4+ T cells.

[0273] The term “population of immune effector cells” as used herein refers to a composition comprising at least two, e.g., two or more, e.g., more than one, immune effector cell, and does not denote any level of purity or the presence or absence of other cell types. In an exemplary embodiment, the population is substantially free of other cell types. In another exemplary embodiment, the population comprises at least two cells of the specified cell type or having the specified function or property.

[0274] As used herein, the term “biomaterial” refers to a substance engineered to interact with a biological system for a therapeutic purpose. A “hydrogel” is such a substance comprised of a network of polymer chain that may be hydrated to adopt a gel form—typically as a result of cross-linking between the polymer chains. A “cryogel” is a form of hydrogel that has been formed by freezing. In some embodiments, a cryogel is formed by allowing crosslinking to occur in a partially frozen state, resulting in a hydrogel network.

[0275] The terms “T_{SCM}-like cell,” “naive T Cell’ and “naïve T cell” are used interchangeably and refer to a less differentiated T cell state, that is characterized by surface expression of CD45RA and CD62L (e.g., is CD45RA positive and CD62L positive (sometimes written as CD45RA+CD62L+)). In general, T cell differentiation proceeds, from most “naive” to most “exhausted,” T_{SCM}-like (e.g., a CD45RA+CD62L+ cell)>T_{CM} (e.g., a CD45RA-CD62L+ cell)>T_{EM} (e.g., a CD45RA−CD62L− cell)>T_{EFF}. Naive T cells may be characterized, for example, as having increased self-renewal, anti-tumor efficacy, proliferation and/or survival, relative to a more exhausted T cell phenotype. In an exemplary embodiment, a naive T cell refers to a CD45RA+CD62L+ T cell. In another exemplary embodiment, a naive T cell refers to a T_{SCM} cell, e.g., a CD45RA+CD62L+CCR7+CD27+CD95+ T cell.

[0276] The term “T_{SCM}” refers to a T cell having a stem cell memory phenotype, characterized in that it expresses CD45RA, CD62L, CCR7, CD27 and CD95 on its cell surface (e.g., is CD45RA positive, CD62L positive, CCR7 positive, CD27 positive and CD95 positive (sometimes written as CD45RA+CD62L+CCR7+CD27+CD95+)). A T_{SCM} cell is an example of a naive T cell. The T cell may be CD4+ and/or CD8+ T cell.

[0277] For specific proteins described herein (e.g., VEGF-C), the named protein includes any of the protein naturally occurring forms, variants or homologs (e.g., within at least 50%, 80%, 90%, 95%, 96%, 97%, 98%, 99% or 100% activity compared to the native protein). In some embodiments, variants or homologs have at least 90%, 95%, 96%, 97%, 98%, 99% or 100% amino acid sequence identity across the whole sequence or a portion of the sequence (e.g. a 50, 100, 150 or 200 continuous amino acid portion) compared to a naturally occurring form. In some embodiments, the protein is the protein as identified by its NCBI sequence reference (e.g., NP_005420.1). In some embodiments, the protein is the protein as identified by its NCBI sequence reference, homolog or functional fragment thereof.

[0278] As used herein, the term “alkyl” refers to a fully saturated branched or unbranched (or straight chain or linear) hydrocarbon moiety, comprising 1 to 20 carbon atoms. Preferably the alkyl comprises 1 to 6 carbon atoms, and more preferably 1 to 4 carbon atoms. Representative examples of alkyl include methyl, ethyl, n-propyl, iso-propyl, n-butyl, sec-butyl, iso-butyl, vert-butyl, n-pentyl, isopentyl, neopentyl, n-hexyl, 3-methylhexyl, 2,2-dimethylpentyl, 2,3-dimethylpentyl, n-heptyl. For example, the term “C₁₋₆alkyl” refers to a hydrocarbon having from one to six carbon atoms, and the term “C₁₋₇alkyl” refers to a hydrocarbon having from one to seven carbon atoms.

[0279] As used herein, the term “haloalkyl” refers to an alkyl as defined herein, that is substituted by one or more halo groups as defined herein. Preferably the haloalkyl can be monohaloalkyl, dihaloalkyl or polyhaloalkyl including perhaloalkyl. A monohaloalkyl can have one iodo, bromo, chloro or fluoro within the alkyl group. Dihaloalky and polyhaloalkyl groups can have two or more of the same halo atoms or a combination of different halo groups within the alkyl. Preferably, the polyhaloalkyl contains up to 12, or 10, or 8, or 6, or 4, or 3, or 2 halo groups. Representative examples of haloalkyl are fluoromethyl, difluoromethyl, trifluoromethyl, chloromethyl, dichloromethyl, trichloromethyl, pentafluoroethyl, heptafluoropropyl, difluorochloromethyl, dichlorofluoromethyl, difluoroethyl, difluoropropyl, dichloroethyl and dichloropropyl. A perhaloalkyl refers to an alkyl having all hydrogen atoms replaced with halo atoms. For example, the term “halo-C₁₋₆alkyl” refers to a hydrocarbon having one to six carbon atoms and being substituted by one or more halo groups, and the term “halo-C₁₋₇alkyl” refers to a hydrocarbon having one to seven carbon atoms and being substituted by one or more halo groups.

[0280] As used herein, “salts” includes pharmaceutically acceptable acid addition salts that can be formed with inorganic acids and organic acids, e.g., acetate, aspartate, benzoate, besylate, bromide/hydrobromide, bicarbonate/carbonate, bisulfate/sulfate, camphorsulformate, chloride/hydrochloride, chlortheophyllonate, citrate, ethandisulfonate, fumarate, gluceptate, gluconate, glucuronate, hippurate, hydroiodide/iodide, isethionate, lactate, lactobionate, laurylsulfate, malate, maleate, malonate, mandelate, mesylate, methylsulphate, naphthoate, napsylate, nicotinate, nitrate, octadecanoate, oleate, oxalate, palmitate, pamoate, phosphate/hydrogen phosphate/dihydrogen phosphate, polygalacturonate, propionate, stearate, succinate, sulfosalicylate, tartrate, tosylate and trifluoroacetate salts.

[0281] Inorganic acids from which salts can be derived include, for example, hydrochloric acid, hydrobromic acid, sulfuric acid, nitric acid, phosphoric acid, and the like. Organic acids from which salts can be derived include, for example, acetic acid, propionic acid, glycolic acid, oxalic acid, maleic acid, malonic acid, succinic acid, fumaric acid, tartaric acid, citric acid, benzoic acid, mandelic acid, methanesulfonic acid, ethanesulfonic acid, toluenesulfonic acid, sulfosalicylic acid, and the like. Pharmaceutically acceptable base addition salts can be formed with inorganic and organic bases.

[0282] Inorganic bases from which salts can be derived include, for example, ammonium salts and metals from columns I to XII of the periodic table. In certain embodiments, the salts are derived from sodium, potassium, ammonium, calcium, magnesium, iron, silver, zinc, and copper; particularly suitable salts include ammonium, potassium, sodium, calcium and magnesium salts. Organic bases from which salts can be derived include, for example, primary, secondary, and tertiary amines, substituted amines including naturally occurring substituted amines, cyclic amines, basic ion exchange resins, and the like. Certain organic amines include isopropylamine, benzathine, cholinate, diethanolamine, diethylamine, lysine, meglumine, piperazine and tromethamine.

[0283] Ranges: throughout this disclosure, various aspects of the invention can be presented in a range format. It should be understood that the description in range format is merely for convenience and brevity and should not be construed as an inflexible limitation on the scope of the invention. Accordingly, the description of a range should be considered to have specifically disclosed all the possible subranges as well as individual numerical values within that range. For example, description of a range such as from 1 to 6 should be considered to have specifically disclosed subranges such as from 1 to 3, from 1 to 4, from 1 to 5, from 2 to 4, from 2 to 6, from 3 to 6 etc., as well as individual numbers within that range, for example, 1, 2, 2.7, 3, 4, 5, 5.3, and 6. As another example, a range such as 95-99% identity, includes something with 95%, 96%, 97%, 98% or 99% identity, and includes subranges such as 96-99%, 96-98%, 96-97%, 97-99%, 97-98% and 98-99% identity. This applies regardless of the breadth of the range.

[0284] The terms “B cell antigen” or “B-Cell antigen” are used interchangeably, and refer to a molecule (typically a protein, carbohydrate or lipid) that is preferentially or specifically expressed on the surface of a B cell which can be targeted with an agent which binds thereto. The B cell antigen of particular interest is preferentially expressed on B cells compared to other non-B cell tissues of a mammal. The B cell antigen may be expressed on one particular B cell population, e.g., B cell precursors or mature B cells, or on more than one particular B cell population, e.g., both precursor B cells and mature B cells. Exemplary B cell surface markers include: CD5, CD10, CD19, CD20, CD21, CD22, CD23, CD24, CD25, CD27, CD30, CD34, CD37, CD38, CD40, CD53, CD69, CD72, CD73, CD74, CD75, CD77, CD79a, CD79b, CD80, CD81, CD82, CD83, CD84, CD85, CD86, CD123, CD135, CD138, CD179, CD269, Flt3, ROR1, BCMA, FcRn5, FcRn2, CS-1, CXCR4, 5, 7, IL-7/3R, 1L7/4/3R, and IL4R. In some embodiments, the B-Cell antigen is: CD19, CD20, CD22, FcRn5, FcRn2, BCMA, CS-1 or CD138. In embodiments, the B-Cell antigen is CD19. In embodiments, the B-Cell antigen is CD20. In embodiments, the B-Cell antigen is CD22. In embodiments, the B-Cell antigen is BCMA. In embodiments, the B-Cell antigen is FcRn5. In embodiments, the B-Cell antigen is FcRn2. In embodiments, the B-Cell antigen is CS-1. In embodiments, the B-Cell antigen is CD138.

[0285] The terms “solid tumor antigen” or “solid tumor cell antigen” refer to a molecule (typically a protein, carbohydrate or lipid) that is preferentially or specifically expressed on the surface of a solid tumor cell which can be targeted with an agent which binds thereto. The solid tumor antigen of particular interest is preferentially expressed on a solid tumor cell compared to other non-tumor tissues of a mammal. The solid tumor antigen may be expressed on one particular solid tumor cell population, e.g., on mesothelioma tumor cells, or on more than one particular solid tumor cell population, e.g., both mesothelioma tumor cells and ovarian cancer cells. Exemplary solid tumor antigens include: EGFRvIII, mesothelin, GD2, Tn Ag, PSMA, TAG72, CD44v6, CEA, EPCAM, KIT, IL-13Ra2, leguman, GD3, CD171, IL-11Ra, PSCA, MAD-CT-1, MAD-CT-2, VEGFR2, LewisY, CD24, PDGFR-beta, SSEA-4, folate receptor alpha, ERBBs (e.g., ERBB2), Her2/neu, MUC1, EGFR, NCAM, Ephrin B2, CAIX, LMP2, sLe, HMWMAA, o-acetyl-GD2, folate receptor beta, TEM1/CD248, TEM7R, FAP, Legumain, HPV E6 or E7, ML-IAP, CLDN6, TSHR, GPRC5D, ALK, Polysialic acid, Fos-related antigen, neutrophil elastase, TRP-2, CYP1B1, sperm protein 17, beta human chorionic gonadotropin, AFP, thyroglobulin, PLAC1, globoH, RAGE1, MN-CA IX, human telomerase reverse transcriptase, intestinal carboxyl esterase, mut hsp 70-2, NA-17, NY-BR-1, UPK2, HAVCR1, ADRB3, PANX3, GPR20, Ly6k, OR51E2, TARP, GFRa4, and a peptide of any of these antigens presented on MHC. In some embodiments, the solid tumor antigen is CLDN6, mesothelin or EGFRvIII.

[0286] The terms “myeloid tumor antigen” or “myeloid tumor cell antigen” refer to a molecule (typically a protein, carbohydrate or lipid) that is preferentially or specifically expressed on the surface of a myeloid tumor cell which can be targeted with an agent which binds thereto. The myeloid tumor antigen of particular interest is preferentially expressed on a myeloid tumor cell compared to other non-tumor tissues of a mammal. The myeloid tumor antigen may be expressed on one particular myeloid tumor cell population, e.g., on acute myeloid leukemia (AML) tumor cells, or on more than one particular myeloid tumor cell population. Exemplary myeloid tumor antigens include: CD33 and CLL-1.

[0287] The term “antigen of a hematological tumor not of B-Cell lineage” refers to a molecule (typically a protein, carbohydrate or lipid) that is preferentially or specifically expressed on the surface of a tumor or cancer of hematopoietic or lymphoid tissue origin, other than of B-Cell origin. These include tumors of myeloid lineage origin, e.g., tumors derived from granulocyte, erythrocyte, thrombocyte, macrophage and/or mast cell origin, or any of their precursor cell populations, and tumors of lymphoid origin other than B-Cell origin, e.g., T cell, NK cell and/or plasma cell origin, or any of their precursor cell populations.

[0288] Headings, sub-headings or numbered or lettered elements, e.g., (a), (b), (i) etc., are presented merely for ease of reading. The use of headings or numbered or lettered elements in this document does not require the steps or elements be performed in alphabetical order or that the steps or elements are necessarily discrete from one another.

[0289] All publications, patent applications, patents, and other references mentioned herein are incorporated by reference in their entirety.

[0290] Other features, objects, and advantages of the invention will be apparent from the description and drawings, and from the claims.

### Description

[0291] Contemplated herein is a first composition comprising a biomaterial and a cell recruitment factor and/or a second composition comprising a viral vector, optionally with a particle, e.g., a mesoporous silica particle (MSP), and a cell activation agent, e.g., a multispecific binding molecule described herein.

[0292] Also, contemplated herein is a composition comprising a biomaterial comprising a cell recruitment factor; a first population of mesoporous silica particles; a viral vector; and, optionally, a cell activation agent, and methods of use thereof Also, contemplated herein is a composition and a biomaterial comprising a cell recruitment factor; a first population of mesoporous silica particles; a viral vector; and, optionally, a cell activation agent, and methods of use thereof.

[0293] The elements of these compositions and methods of use thereof are described herein below. Not to be bound by theory, Applicants contemplate that the compositions are able to be delivered locally, e.g., under the skin, and through use of a cell recruitment factor, cells are recruited to the defined site of delivery and are able to be transduced by the viral vector. In embodiments where the vector encodes a CAR, the transduced cells are CAR expressing and, thus, may be used to target a particular antigen to treat a disease, disorder, or condition.

[0294] Biomaterials

[0295] In some embodiments, the biomaterial comprises a hydrogel, optionally a cryogel. In some embodiments, the cryogel comprises gelatin, hyaluronic acid (HA), collagen, alginate, laminin, chitosan, silk fibroin, agarose, poly(ethylene glycol), poly-vinyl alcohol, and/or hydroxyethyl methylacrylate. In some embodiments, the biomaterial comprises an alginate hydrogel, e.g., an alginate cryogel. In some embodiments, the biomaterial comprises a hyaluronic acid hydrogel (HA hydrogel). In some embodiments, the biomaterial comprises a hyaluronic acid cryogel.

[0296] In some embodiments, alginate hydrogel, e.g., an alginate cryogel further comprises norbornene and/or tetrazine. In some embodiments, the norbornene and/or tetrazine is covalently associated with, e.g., chemically linked to the alginate. In some embodiments, the norbornene and/or tetrazine is non-covalently associated with, e.g., adsorbed on, the alginate.

[0297] In some embodiments, a composition comprising the cryogel, e.g., an alginate cryogel, and a cell recruitment factor further comprises laponite. In some embodiments, a composition comprising the hydrogel, e.g., an HA hydrogel, and a cell recruitment factor further comprises laponite. Without wishing to be bound by theory, in some embodiments, use of laponite allows for a slow and/or controlled release of the cell recruitment factor from the composition. In some embodiments, the laponite is present at a concentration of about 0.1 to about 0.5 mg/mL, e.g., about 0.1 to 0.4 mg/mL, about 0.1 to 0.35 mg/mL, about 0.1 to 0.3 mg/mL, about 0.1 to 0.25 mg/mL, about 0.1 to 0.15 mg/mL, about 0.15 to 0.5 mg/mL, about 0.15 to 0.4 mg/mL, about 0.15 to 0.35 mg/mL, about 0.15 to 0.3 mg/mL, about 0.15 to 0.25 mg/mL, about 1.5 mg/mL to 0.2 mg/mL, about 0.2 to 0.5 mg/mL, about 0.2 to 0.4 mg/mL, about 0.2 to 0.35 mg/mL, about 0.2 to 0.3 mg/mL, about 0.2 to 0.25 mg/mL, about 0.25 to 0.5 mg/mL, about 0.25 to 0.4 mg/mL, about 0.25 to about 0.35 mg/mL, about 0.25 to 0.3 mg/mL, about 0.3 to 0.5 mg/mL, about 0.3 to 0.4 mg/mL, about 0.35 to 0.5 mg/mL, about 0.35 to 0.4 mg/mL, about 0.4 to 0.5 mg/mL, about 0.1 mg/mL, about 0.15 mg/mL, about 0.2 mg/mL, about 0.25 mg/mL, 0.3 mg/mL, about 0.35 mg/mL, or about 0.5 mg/mL. In some embodiments, the laponite is present at a concentration of about 0.25 mg/mL.

[0298] In some embodiments, the cryogel comprises pores between about 10 to 300 μm in diameter, e.g., between about 10 to 20 μm, about 10 to 30 μm, about 10 to 40 μm, about 10 to 50 μm, about 10 to 100 μm, about 10 to 150 μm, about 10 to 200 μm, about 10 to 250 μm, about 20 to 30 μm, about 20 to 40 μm, about 20 to 50 μm, about 20 to 100 μm, about 20 to 150 μm, about 20 to 200 μm, about 20 to 250 μm, about 20 to 300 μm, about 50 to 300 μm, about 50 to 100 μm, 50 to about 150 μm, 50 to about 200 μm, 50 to about 250 μm, 100 to about 150 μm, 100 to about 200 μm, 100 to about 250 μm, about 100 to 300 μm, about 150 to 200 μm, about 150 to 250 μm, about 150 to 300 μm, about 200 to 250 μm, about 200 to 300 μm, or about 250 to 300 μm. In some embodiments, the cryogel does not comprise pores. In some embodiments, the cryogel comprises pores of substantially the same size. In some embodiments, the biomaterial comprises pores of different sizes. In some embodiments, the cryogel is chemically crosslinked.

[0299] Methods of manufacturing biomaterials are well known in the art. See, e.g., Koshy, S. T., Zhang, D., Grolman, J. M., Stafford, A. G., & Mooney, D. J. (2018). Injectable nanocomposite cryogels for versatile protein drug delivery. Acta biomaterialia, 65, 36-43 (describing the manufacture of an alginate cryogel). Additionally, biomaterials and components thereof may be commercially purchased, e.g., Partek SLC (silica from EMD Millipore) or TruTag silica particles.

[0300] In some embodiments, the cryogel, e.g., the alginate cryogel, is administered to a high subcutaneous space or a subcutaneous space adjacent to the dermis. In some embodiments, the hydrogel, e.g., the HA hydrogel, is administered to a high subcutaneous space or a subcutaneous space adjacent to the dermis.

[0301] Cell Recruitment Factors

[0302] In some embodiments, a cell recruitment factor is to be used in a composition or method described herein.

[0303] In some embodiments, the cell recruitment factor induces lymphangiogenesis. In some embodiments, induction of lymphangiogenesis comprises an increase in the level and/or activation of lymphatic endothelial cells (LECs) (for example, CD45−CD31+PDPN+ cells). In some embodiments, the level of LECs (e.g., CD45−CD31+PDPN+ cells) is increased by at least 10%, 20%, 30%, 40%, 50%, 60, 70%, 75%, 80%, 85%, 90%, 95% 100%, or 200%.

[0304] In some embodiments, the cell recruitment factor recruits, e.g., selectively recruits immune cells, optionally T-cells and/or NK-cells. In some embodiments, the cell recruitment factor recruits cells (e.g., immune cells, e.g., T cells) directly. In some embodiments, the cell recruitment factor recruits cells (e.g., immune cells, e.g., T cells) indirectly. In some embodiments, the cell recruitment factor induces lymphangiogenesis, which in turn recruits cells, e.g., immune cells, e.g., T cells.

[0305] In some embodiments, the cell recruitment factor recruits (for example, directly or indirectly) T cells, e.g., naïve T cells (for example, CD45RA+CD62L+ T cells or CD45RA+CD62L+CCR7+CD27+CD95+ T cells). In some embodiments, recruitment of T cells comprises an increase in the level of T cells. In some embodiments, the level of T cells is increased by at least 10%, 20%, 30%, 40%, 50%, 60, 70%, 75%, 80%, 85%, 90%, 95%, 100%, 200%, 250%, or 300%.

[0306] In some embodiments, the cell recruitment factor is selected from the group consisting of CCL19, CXCL9, CXCL10, XCL1, IL-2, IL-7, CCL21, GM-CSF, CCL17, CCL22, CCL20, CCL27, IL-15 (for example, hetIL-15 (IL15/sIL-15Ra)), lymphotoxin alpha, lymphotoxin beta, VEGF-C, FLT3L, G-CSF, PDGF, S100A8/A9, CSF-1, CXCL8, CCL20, CCL17, CCR5, CCR6, CCL2, VEGF, Angiopoietin-2, PGE2, LTB4, CXC3L1, CCL19, CCL21, CXCL10, CXCL11, and/or CXCL12. In some embodiments, the cell recruitment factor comprises VEGF-C or a functional variant thereof.

[0307] Without wishing to be bound by theory, in some embodiments, the release of the cell recruitment factor, e.g., a VEGF-C or variant thereof, from a cryogel described herein induces lymphangiogenesis of pre-existing skin lymphatic capillaries, activating lymphatic endothelial cells (LEC), which in turn secrete chemokines such as CCL21, recruiting T cells, e.g., naïve T cells, to the site of administration of the cryogel, e.g., to the site in the dermis on top of the gel. In some embodiments, the time to induce lymphangiogenesis and recruit immune cells, e.g., T cells, by a cell recruitment factor described herein comprises about 5 to about 28 days, e.g., about 5 to 21 days, about 5 to 15 days, about 5 to 14 days, about 5 to 10 days, about 7 to about 28 days, about 7 to about 21 days, about 7 to 15 days, about 7 to 14 days, about 7 to 10 days, about 10 to 28 days, about 10 to 21 days, about 10 to 15 days, about 10 to 14 days, about 14 to 28 days, about 14 to 21 days, about 15 to 28 days, about 15 to 21 days, about 21 to 28 days, about 7 days, about 10 days, about 14 days, about 15 days, or about 20 days, about 21 days, about 28 days. In some embodiments, the time to induce lymphangiogenesis and recruit immune cells, e.g., T cells, by a cell recruitment factor described herein comprises 14 days (e.g., two weeks). In some embodiments, the time to induce lymphangiogenesis and recruit immune cells, e.g., T cells, by a cell recruitment factor described herein comprises 21 days (e.g., three weeks). In some embodiments, the time to induce lymphangiogenesis and recruit immune cells, e.g., T cells, by a cell recruitment factor described herein comprises 28 days (e.g., four weeks or one month).

[0308] Methods of producing, formulating, and/or procuring these various cell recruitment factors are known in the art. See, e.g., Leppanen V M, Prota A E, Jeltsch M, et al. Structural determinants of growth factor binding and specificity by VEGF receptor 2. Proc Natl Acad Sci USA. 2010; 107(6):2425-2430. doi:10.1073/pnas.0914318107; Leppänen V M, Tvorogov D, Kisko K, et al. Structural and mechanistic insights into VEGF receptor 3 ligand binding and activation. Proc Natl Acad Sci USA. 2013; 110(32):12960-12965. doi:10.1073/pnas.1301415110; Joyce Chiu, Jason W. H. Wong, Michael Gerometta, and Philip J. Hogg. Mechanism of Dimerization of a Recombinant Mature Vascular Endothelial Growth Factor C Biochemistry 2013 53 (1), 7-9. doi: 10.1021/bi401518b; Broggi, M. A. S., Schmaler, M., Lagarde, N., Rossi, S. W. Isolation of Murine Lymph Node Stromal Cells. J. Vis. Exp. (90), e51803, doi:10.3791/51803 (2014); Fankhauser, M., M. A. Broggi, L. Potin, N. Bordry, L. Jeanbart, A. W. Lund, E. Da Costa, S. Hauert, M. Rincon-Restrepo, and C. Tremblay. 2017. Tumor lymphangiogenesis promotes T cell infiltration and potentiates immunotherapy in melanoma. Science translational medicine. 9:eaa14712; US 2019/0099485 A1: “Lymphangiogenesis for therapeutic immunomodulation” (2017); and Vokali, E., S. Y. Shann, S. Hirosue, M. Rincon-Restrepo, F. V. Duraes, S. Scherer, P. Corthésy-Henrioud, W. W. Kilarski, A. Mondino, and D. Zehn. 2020. Lymphatic endothelial cells prime naïve CD8+ T cells into memory cells under steady-state conditions. Nature communications. 11:1-18.

[0309] In some embodiments, the VEGF-C is selected from the group consisting of immature VEGF-C peptide or mature VEGF-C peptide. In some embodiments, the mature VEGF-C peptide is the minor mature form or major mature form. In some embodiments, the mature VEGF-C peptide is a wild type minor mature form or a wild type major mature form. In some embodiments, the mature VEGF-C peptide is a modified minor mature form or a modified major mature form. In some embodiments, the mature VEGF-C peptide is a modified minor mature form comprising a mutation at Cysteine 137 (e.g., C137A) or a modified major mature form comprising a mutation at Cysteine 137 (e.g., C137A), numbered according to SEQ ID NO: 725. In some embodiments, the mature VEGF-C peptide is a modified minor mature form comprising a C137A mutation or a modified major mature form comprising a C137A mutation. In some embodiments, the mature VEGF-C peptide is present as a dimer or monomer. In some embodiments, the VEGF-C is a dimer of the major mature form further comprising a C137A mutation in each monomer. In some embodiments, the VEGF-C is a dimer of the minor mature form further comprising a C137A mutation in each monomer. In some embodiments, the VEGF-C is selected from a sequence provided in Table 18 below. In some embodiments, the VEGF-C is selected from a sequence provided in Table 18 or a sequence having at least about 80%, 85%, 90%, 92%, 95%, 97%, 98%, or 99% sequence identity thereto. In some embodiments, the VEGF-C sequence comprises or does not comprise a linker (e.g., a glycine-serine linker) and/or a his tag.

[0310] In some embodiments, the VEGF-C comprises the amino acid sequence of SEQ ID NO: 731, 732, 733, or 734, or a sequence having at least about 80%, 85%, 90%, 92%, 95%, 97%, 98%, or 99% sequence identity thereto. In some embodiments, the VEGF-C comprises the amino acid sequence of SEQ ID NO: 741, or a sequence having at least about 80%, 85%, 90%, 92%, 95%, 97%, 98%, or 99% sequence identity thereto, provided that position 26 is not Cysteine (C), e.g., is Alanine (A). In some embodiments, the VEGF-C comprises the amino acid sequence of SEQ ID NO: 737 or 738, or a sequence having at least about 80%, 85%, 90%, 92%, 95%, 97%, 98%, or 99% sequence identity thereto.

[0311] In some embodiments, the VEGF-C comprises the amino acid sequence of SEQ ID NO: 743, or a sequence having at least about 80%, 85%, 90%, 92%, 95%, 97%, 98%, or 99% sequence identity thereto. In some embodiments, the VEGF-C further comprises the amino acid sequence of SEQ ID NO: 740 or a sequence having at least about 80%, 85%, 90%, 92%, 95%, 97%, 98%, or 99% sequence identity thereto.

[0312] In some embodiments, the VEGF-C comprises the amino acid sequence of SEQ ID NO: 736 or an amino acid sequence having at least about 80%, 85%, 90%, 92%, 95%, 97%, 98%, or 99% sequence identity thereto. In some embodiments, the VEGF-C comprises the amino acid sequence of SEQ ID NO: 735 or an amino acid sequence having at least about 80%, 85%, 90%, 92%, 95%, 97%, 98%, or 99% sequence identity thereto.

TABLE 18
VEGF-C Variants
The sequences below correspond to a monomer. When a dimer is formed, 2 of the same
sequences are assembled together via cysteine bridges. It is noted that the his tag is used for
experimental purposes but may not be necessary in all embodiments.

| SEQ | | | |
|---|---|---|---|
| ID NO: | DESCRIPTOR | SEQUENCE | KEY |
| 725 | >sp\|P49767\|VEGFC_ | MHLLGFFSVACSLLAAALLPGPREAPAAAAAFE | Underlined: cleaved |
| | HUMAN Vascular | SGLDLSDAEPDAGEATAYASKDLEEQLRSVSS | residues |
| | endothelial growth | VDELMTVLYPEYWKMYKCQLRKGGWQHN | Bold: propeptide |
| | factor C OS = Homo | REQANLNSRTEETIKFAAAHYNTEILKSIDNEW | |
| | sapiens OX = 9606 | RKTQCMPREVCIDVGKEFGVATNTFFKPPCVSV | |
| | GN = VEGFC PE = 1 | YRCGGCCNSEGLQCMNTSTSYLSKTLFEITVPLS | |
| | SV = 1 | QGPKPVTISFANHTSCRCMSKLDVYRQVHSIIRR | |
| | | SLPATLPQCQAANKTCPTNYMWNNHICRCLAQ | |
| | | EDFMFSSDAGDDSTDGFHDICGPNKELDEETCQ | |
| | | CVCRAGLRPASCGPHKELDRNSCQCVCKNKLFP | |
| | | SQCGANREFDENTCQCVCKRTCPRNQPLNPGK | |
| | | CACECTESPQKCLLKGKKFHHQTCSCYRRPCTN | |
| | | RQKACEPGFSYSEEVCRCVPSYWKRPQMS | |
| 727 | >1 immature | FESGLDLSDAEPDAGEATAYASKDLEEQLRSVS | Underlined |
| | peptide | SVDELMTVLYPEYWKMYKCQLRKGGWQHNRE | propeptide |
| | (32-227)- | QANLNSRTEETIKFAAAHYNTEILKSIDNEWRKT | Double underlined: |
| | VEGFC_His | QCMPREVCIDVGKEFGVATNTFFKPPCVSVYRC | GS linker |
| | | GGCCNSEGLQCMNTSTSYLSKTLFEITVPLSQGP | Bold: his tag |
| | | KPVTISFANHTSCRCMSKLDVYRQVHSIIRRGSH | |
| | | HHHHH | |
| 729 | >1 immature | FESGLDLSDAEPDAGEATAYASKDLEEQLRSVS | Underlined: |
| | peptide | SVDELMTVLYPEYWKMYKCQLRKGGWQHNRE | propeptide |
| | (32-227)-VEGFC | QANLNSRTEETIKFAAAHYNTEILKSIDNEWRKT | |
| | | QCMPREVCIDVGKEFGVATNTFFKPPCVSVYRC | |
| | | GGCCNSEGLQCMNTSTSYLSKTLFEITVPLSQGP | |
| | | KPVTISFANHTSCRCMSKLDVYRQVHSIIRR | |
| 731 | >2 major mature | AHYNTEILKSIDNEWRKTQCMPREVCIDVGKEF | Double underlined: |
| | (112-227)- | GVATNTFFKPPCVSVYRCGGCCNSEGLQCMNT | GS linker |
| | VEGFC_His | STSYLSKTLFEITVPLSQGPKPVTISFANHTSCRC | Bold: his tag |
| | | MSKLDVYRQVHSIIRRGSHHHHHH | |
| 732 | >2 major mature | AHYNTEILKSIDNEWRKTQCMPREVCIDVGKEF | |
| | (112-227)-VEGFC | GVATNTFFKPPCVSVYRCGGCCNSEGLQCMNT | |
| | | STSYLSKTLFEITVPLSQGPKPVTISFANHTSCRC | |
| | | MSKLDVYRQVHSIIRR | |
| 733 | >7 minor mature | TEETIKFAAahynteilksidnewrktqcmprevcidvgkefgv | Capital: fragment of |
| | (103-227)- | atntffkppcvsvyrcggccnseglqcmntstsylsktlfeitv | propeptide |
| | VEGFC_His | plsqgpkpvtisfanhtscrcmskldvyrqvhsiirrgshhhhhh | Double underlined: |
| | | | GS linker |
| | | | Bold: his tag |
| 734 | >7 minor mature | TEETIKFAAahynteilksidnewrktqcmprevcidvgkefgv | Capital: fragment of |
| | (103-227)-VEGFC | atntffkppcvsvyrcggccnseglqcmntstsylsktlfeitv | propeptide |
| | | plsqgpkpvtisfanhtscrcmskldvyrqvhsiirr | |
| 735 | >8 minor mature | TEETIKFAAahynteilksidnewrktqcmprevAidvgkefgv | Capital: fragment of |
| | with mutation | atntffkppcvsvyrcggccnseglqcmntstsylsktlfeitv | propeptide |
| | (103-227)- | plsqgpkpvtisfanhtscrcmskldvyrqvhsiirrgshhhhh | Capital, bold A: C |
| | VEGFC_C137A_His | h | to A mutation |
| | | | Double underlined: |
| | | | GS linker |
| | | | Bold: his tag |
| 736 | >8 minor mature | TEETIKFAAahynteilksidnewrktqcmprevAidvgkefgv | Capital: fragment of |
| | with mutation | atntffkppcvsvyrcggccnseglqcmntstsylsktlfeitv | propeptide |
| | (103-227)- | plsqgpkpvtisfanhtscrcmskldvyrqvhsiirr | Capital, bold A: C |
| | VEGFC_C137A | | to A mutation |
| 737 | >9 major mature | ahynteilksidnewrktqcmprevAidvgkefgvatntffkpp | Capital, bold A: C |
| | with mutation | cvsvyrcggccnseglqcmntstsylsktlfeitvplsqgpkpv | to A mutation |
| | (112-227)- | tisfanhtscrcmskldvyrqvhsiirrgshhhhhh | Double underlined: |
| | VEGFC_C137A_His | | GS linker |
| | | | Bold: his tag |
| 738 | >9 major mature | ahynteilksidnewrktqcmprevAidvgkefgvatntffkpp | Capital, bold A: C |
| | with mutation | cvsvyrcggccnseglqcmntstsylsktlfeitvplsqgpkpv | to A mutation |
| | (112-227)- | tisfanhtscrcmskldvyrqvhsiirr | |
| | VEGFC_C137A | | |
| 739 | Propeptide | FESGLDLSDAEPDAGEATAYASKDLEEQLRSVS | |
| | | SVDELMTVLYPEYWKMYKCQLRKGGWQHNRE | |
| | | QANLNSRTEETIKFAA | |
| 740 | Fragment of | TEETIKFAA | |
| | Propeptide | | |
| 741 | VEGF-C consensus | ahynteilksidnewrktqcmprevXidvgkefgvatntffkpp | wherein X is C or A |
| | | cvsvyrcggccnseglqcmntstsylsktlfeitvplsqgpkpv | |
| | | tisfanhtscrcmskldvyrqvhsiirr | |
| 742 | VEGF-C | ahynteilksidnewrktqcmprevcidvgkefgvatntffkpp | |
| | | cvsvyrcggccnseglqcmntstsylsktlfeitvplsqgpkpv | |
| | | tisfanhtscrcmskldvyrqvhsiirr | |
| 743 | VEGF-C with | ahynteilksidnewrktqcmprevAidvgkefgvatntffkpp | Capital, bold A: C |
| | mutation | cvsvyrcggccnseglqcmntstsylsktlfeitvplsqgpkpv | to A mutation |
| | | tisfanhtscrcmskldvyrqvhsiirr | |

[0313] In some embodiments, the VEGF-C is present in an effective amount, optionally in an amount of less than or about 1 mg, less than or about 10 mg, greater than or about 10 μg greater than or about 1 μg between about 1 μg and 1 mg, between about 10 μg and 1 mg, between about 1 μg and 10 mg, or between about 10 μg and 10 mg.

[0314] In some embodiments, the cell recruitment factor can induce, e.g., promote, migration of immune cells, e.g., T cells. In some embodiments, the cell recruitment factor can increase the expansion or proliferation of a population of immune cells, e.g., T cells. In some embodiments, the cell recruitment factor comprises IL-15 (for example, hetIL-15 (IL15/sIL-15Ra)) or a functional variant thereof. Without wishing to be bound by theory, it is believed that use of a cell recruitment factor, e.g., IL-15 (for example hetIL-15 (IL15/sIL-15Ra)) or a variant thereof, in combination with a cryogel induces immune cell expansion or proliferation, resulting in localized activation as well as promotion and enhancement of migration of immune cells, e.g., T cells, into the cryogel.

[0315] In some embodiments, the cell recruitment factor enhances immune cell, e.g., T cell, survival. In some embodiments, the cell recruitment factor comprises IL-7 or a functional variant thereof Without wishing to be bound by theory, it is believed that use of a cell recruitment factor, e.g., IL-7 or functional variant thereof, in combination with a cryogel enhances immune cell, e.g., T cell survival, and proliferation.

[0316] In some embodiments, one, two, three, or more cell recruitment factors are to be used in a composition or method described herein. In some embodiments, the cell recruitment factor comprises VEGF-C or a functional variant thereof; IL-15 (for example, hetIL-15 (IL15/sIL-15Ra)) or a functional variant thereof; IL-7 or a functional variant thereof; or a combination thereof. In some embodiments, the cell recruitment factor comprises VEGF-C or a functional variant thereof and IL-15 (for example, hetIL-15 (IL15/sIL-15Ra)) or a functional variant thereof In some embodiments, the cell recruitment factor comprises VEGF-C or a functional variant thereof and IL-7 or a functional variant. In some embodiments, the cell recruitment factor comprises VEGF-C or a functional variant thereof; IL-15 (for example, hetIL-15 (IL15/sIL-15Ra)) or a functional variant thereof; and IL-7 or a functional variant thereof. In some embodiments, the cell recruitment factor comprises IL-15 (for example, hetIL-15 (IL15/sIL-15Ra)) or a functional variant thereof; and IL-7 or a functional variant thereof.

[0317] Agent to Promote T Cell Function

[0318] In some embodiments, a composition or method described herein utilizes an agent that promotes immune cell, e.g. T cell, function. In some embodiments, the agent to promote T cell, function reduces T cell exhaustion and/or prevents T cell dysfunction.

[0319] In some embodiments, the agent to promote T cell function comprises an inhibitor of a Tet2 gene, e.g., a Tet2 inhibitor. While not wishing to be bound by the theory, disruption of a single allele of a Tet gene (e.g., a Tet1, Tet2, or Tet3) leads to decreased total levels of 5-hydroxymethylcytosine in association with enhanced proliferation, regulation of effector cytokine production and degranulation, and thereby increases CAR T cell proliferation and/or function. In some embodiments, the Tet2 inhibitor comprises: (1) a gene editing system targeted to one or more sites within the gene encoding Tet2, or its corresponding regulatory elements; (2) a nucleic acid (e.g., an siRNA or shRNA) that inhibits expression of Tet2; (3) a protein (e.g., a dominant negative, e.g., catalytically inactive) Tet2, or a binding partner of Tet2 (e.g., a dominant negative binding partner of Tet2); (4) a small molecule that inhibits expression and/or function of Tet2; (5) a nucleic acid encoding any of (1)-(3); or (6) any combination of (1)-(5). In some embodiments, the agent to promote T cell function comprises a Tet2 inhibitor as described in, e.g., WO2017/049166, WO2018/175733, and WO2019/210153, the contents of which are hereby incorporated by reference in their entirety.

[0320] In some embodiments, the agent to promote T cell function comprises an inhibitor of ZBTB32, e.g., a ZBTB32 inhibitor. Without wishing to be bound by theory, it is believed that in some embodiments, inhibition of ZBTB32 can enhance T cell-mediated anti-tumor response. In certain embodiments, inhalation of ZBTB32 enhances CART cell activity, e.g., cell expansion, cytokine production, persistence, resistance to exhaustion, and anti-tumor activity in vivo. In some embodiments, the ZBTB32 inhibitor comprises: (1) a gene editing system targeting the ZBTB32 gene or one or more components thereof, (2) a nucleic acid encoding one or more components of the gene editing system; or (3) a combination of (1) and (2). In an embodiment, the ZBTB32 inhibitor comprises: (1) a gene editing system targeting the ZBTB32 gene or one or more components thereof. In an embodiment, the ZBTB32 inhibitor comprises (2) a nucleic acid encoding one or more components of the gene editing system. In an embodiment, the ZBTB32 inhibitor comprises a combination of (1) and (2). In some embodiments, the agent to promote T cell function comprises a ZBTB32 inhibitor as described in PCT/US2021/037048, the contents of which are hereby incorporated by reference in their entirety.

[0321] Extended Release Agent

[0322] In some embodiments, a composition or method described herein utilizes an extended release agent. In some embodiments, the extended release agent can be used to provide extended release of a viral vector (e.g., a lentiviral vector, e.g., a lentiviral vector encoding a CAR), a cell activation agent, or both a viral vector and a cell activation agent. In some embodiments, the extended release agent is formulated for administration by injection. In some embodiments, the extended release agent comprises a particle, e.g., a silica particle, e.g., a mesoporous silica particle.

[0323] Surface Modified Mesoporous Silica Particles

[0324] In some embodiments, a composition or method described herein utilizes a mesoporous silica particle. Mesoporous silica particles comprise a porous body, for example, with hexagonal close-packed, cylinder-shaped, uniform pores. Mesoporous silica particles can be synthesized by using a rod-like micelle of a surfactant as a template, which is formed in water by dissolving and hydrolyzing a silica source such as alkoxysilane, sodium silicate solution, kanemite, silica fine particle in water or alcohol in the presence of acid or basic catalyst. See, e.g., US Pub. No. 2015-0072009 and Hoffmann et al., Angewandte Chemie International Edition, 45, 3216-3251, 2006. Many kinds of surfactants such as cationic, anionic, and nonionic surfactants have been examined as the surfactant and it has been known that generally, an alkyl trimethylammonium salt of cationic surfactant leads to a mesoporous silica having the greatest specific surface area and a pore volume. See, U.S. Publication No. 2013/0052117 and Katiyar et al. (Journal of Chromatography 1122 (1-2): 13-20).

[0325] The mesoporous silica particles may be provided in various forms, e.g., microspheres, irregular particles, rectangular rods, round nanorods. The mesoporous silica particles can have various predetermined shapes, including, e.g., a spheroid shape, an ellipsoid shape, a rod-like shape, or a curved cylindrical shape. In particular embodiments, the compositions and methods recited herein use mesoporous silica rods (MSR). Methods of assembling mesoporous silica to generate microrods are known in the art. See, Wang et al, Journal of Nanoparticle Research, 15: 1501, 2013. In some embodiments, mesoporous silica particles are synthesized by reacting tetraethyl orthosilicate with a template made of micellar rods. The result is a collection of mesoporous silica spheres or rods that are filled with a regular arrangement of pores. The template can then be removed by washing with a solvent adjusted to the proper pH. In this example, after removal of surfactant templates, the mesoporous silica particles are characterized by a uniform, ordered, and connected mesoporosity are prepared with a specific surface area of, for example, about 600 m²/g to about 1200 m²/g, particularly about 800 m²/g to about 1000 m²/g and especially about 850 m²/g to about 950 m²/g. In another embodiment, the mesoporous silica particles may be synthesized using a sol-gel method or a spray drying method. Tetraethyl orthosilicate is also used with an additional polymer monomer (as a template). In yet another embodiment, one or more tetraalkoxy-silanes and one or more (3-cyanopropyl)trialkoxy-silanes may be co-condensed to provide the mesoporous silicate particles as rods. See, US Publication Nos. 2013-0145488, 2012-0264599 and 2012-0256336, the content of which are incorporated by reference in their entireties.

[0326] The mesoporous silica particles (MSPs) (e.g., MSRs) may comprise pores, which may be ordered or randomly distributed, of between 2 to 100 nm in diameter, or 2-50 nm in diameter, e.g., pores of between 2-5 nm, 10⁻²⁰ nm, 10⁻³⁰ nm, 10⁻⁴⁰ nm, 20-30 nm, 30-50 nm, 30-40 nm, 40-50 nm. In some embodiments, the microrods comprise pores of approximately 5 nm, 6 nm, 7 nm, 8 nm, 9 nm, 10 nm, 11 nm, 12 nm, or more in diameter. The pore size may be altered depending on the type of application.

[0327] In some embodiments, the length of the MSRs is in the micrometer range, ranging from about 5 μm to about 500 μm. In one example, the MSRs comprise a length of 5-50 μm, e.g., 10-μm, 10⁻³⁰ μm, 10⁻⁴⁰ μm, 20-30 μm, 30-50 μm, 30-40 μm, 40-50 μm. In some embodiments, the MSRs comprise length of 50 m to 250 μm, e.g., about 60 μm, 70 μm, 80 μm, 90 μm, 100 am, 120 μm, 150 μm, 180 μm, 200 μm, 225 μm, or more. In some embodiments, the MSRs having a higher aspect ratio, e.g., with rods comprising a length of 50 m to 200 μm, particularly a length of 80 m to 120 μm, especially a length of about 100 m or more, are used. In yet another embodiment, the MSPs (e.g., MSRs) provide a high surface area for attachment and/or binding to target cells, e.g., T-cells. Methods of obtaining high surface area mesoporous silicates are known in the art. See, e.g., U.S. Pat. No. 8,883,308 and US Publication No. 2011-0253643, the entire contents of which are incorporated by reference herein. In some embodiments, the high surface area is due to the fibrous morphology of the nanoparticles, which makes it possible to obtain a high concentration of highly dispersed and easily accessible moieties on the surface. In certain embodiments, the high surface area MSPs (e.g., MSRs) have a surface area of at least about 100 m²/g, at least 150 m²/g, or at least 300 m²/g. In other embodiments, the high surface area MSPs (e.g., MSRs) have a surface area from about 100 m²/g to about 1000 m²/g, including all values or sub-ranges in between, e.g., 50 m²/g, 100 m²/g, 200 m²/g, 300 m²/g, 400 m²/g, 600 m²/g, 800 m²/g, 100-500 m²/g, 100-300 m²/g, 500-800 m²/g or 500-1000 m²/g.

[0328] In some embodiments, the mesoporous silica particles may include a surface modification. As used herein, “surface modification” means attaching or appending functional groups on to the surface of the MSPs (e.g., MSRs). In some embodiments, the functional groups are adsorbed or covalently bonded onto the surfaces lining the pores and/or nanochannels or the surface of the MSPs (e.g., MSRs). As used herein, the “functional group” defines a chemical moiety linked to the MSR. In some embodiments, the functional group is a —OH (hydroxyl), amine, carboxylic acid, phosphonate, halide, azide, alkyne, epoxide, sulfhydryl, disulfide, polyethyleneimine, hydrophobic moiety, or salts thereof. In some embodiments, the functional group (i.e. —OH (hydroxyl), amine, carboxylic acid, phosphonate, halide, azide, alkyne, epoxide, sulfhydryl, disulfide, polyethyleneimine, hydrophobic moiety, or salts thereof) may be separated from the silica surface by a linker. In some embodiments, the functional group is covalently bonded to the MSP or MSR surface via a C₁ to C₂₀ alkyl linker. In other embodiments, the functional group is covalently bonded to the MSP or MSR surface via a polyethyleneglycol linker. In particular embodiments, the polyethylene glycol linker has the formula (—O(CH₂—CH₂—)₁₋₂₅. In particular embodiments, the surface modification is a C₁ to C₂₀ alkyl perhaloalkyl or a C₁ to C₂₀ alkyl perfluoroalkyl.

[0329] A general structure of surface modifications may be as follows:

[chemical structure]

wherein L is a linker, and X is a functional group.

[0330] In some embodiments, L may be C₁ to C₂₀ alkyl group or a polyethylene glycol group, and X may be —OH (hydroxyl), primary, secondary, tertiary or quaternary amine, carboxylic acid, phosphonate, halide, azide, alkyne, epoxide, sulfhydryl, disulfide, polyethyleneimine, or hydrophobic moiety, or salts thereof.

[0331] As used herein, surface modification having a phosphonate (also known as phosphonate-modified nanoparticles) have at least one phosphonic acid (—P(O)(OH)₂) group or phosphinic acid (—P(O)(OH)R, where R is an C₁ to C₂₀ alkyl group). The phosphonic or phosphinic acid may be charged or uncharged, depending on the pH. At physiological pH, phosphonic acids and phosphinic acids are negatively charged, or anionic. Phosphonate modifications may be prepared, for example, by treating the silica body surface with a phosphonate bearing trialkylsiloxane compound or phosphonate-bearing trihydroxylsilyl compound, such as (trihydroxylsilyl)propyl methylphosphonate.

[0332] In some embodiments, the mesoporous silica particles (e.g., MSRs) are surface modified with a primary, secondary, tertiary, or quaternary amine. Secondary, tertiary, and quaternary amines may be substituted with C1 to C₂₀ alkyl groups and may be charged. In some embodiments, the amine group may be in the salt form. In some embodiments, the primary, secondary, tertiary, or quaternary amine may be separated from the MSP surface by a linker. In particular embodiments, the mesoporous silica particles are modified with polyethyleneimine. In specific embodiments, the polyethyleneimine is branched or unbranched. In alternate embodiments, the polyethyleneimine group has an average molecular weight in the range of about 1000 to 100,000 Daltons (Da), as measured by gel permeation chromatography (GPC). In some embodiments, the polyethyleneimine group has an average molecular weight of about 1,200 to 15,000 Da, about 1,500 to 12,000 Da, about 2,000 Da, about 3,000 Da, about 4,000 Da, about 5,000 Da, about 6,000 Da, about 7,000 Da, about 8,000 Da, about 9,000 Da, about 10,000 Da, or about 20,000 Da, as measured by gel permeation chromatography (GPC). Structures of various exemplary surface modified mesoporous silica particles are shown in FIG. 1.

[0333] The MSPs (e.g., MSRs) recited herein are prepared by methods known to those of skill in the art, as noted herein. Generally, MSPs with surface modification may be prepared by the following method.

[0334] In general, any reaction capable of reacting with the silyl hydroxide surface of the MSPs (e.g., MSRs) may be used to covalently modify the surface. For example, the surface of the MSP (e.g. MSR) may be treated with a trialkoxysilyl compound or trihydroxysilyl compound. In some embodiments mesoporous silica particles are suspended in a suitable reaction solvent. In some embodiments, the reaction solvent may be aqueous solvents or buffers of a pH from 0-14. Additional co-mixture of aqueous solutions with 1 or more organic solvents, including but not limited to tetrahydrofuran, 2-methyl tetrahydrofuran, ethyl acetate, toluene, triethylamine, dimethylformamide, dimethylacetamide, dimethylsulfoxide, methanol, ethanol, methylene chloride, or dichloroethane, may be used. In some embodiments, the suspended mesoporous silica particles are reacted with a trialkoxysilyl or trihydroxysilyl reagent having the desired functional group as described herein. Amine modifications may be prepared, for example, by treating the MSPs with an amine bearing trialkoxysilane compound, such as aminopropyltriethoxysilane, 3-(2-aminoethylamino)propyl-trimethoxysilane, or 3-trimethoxysilylpropyl ethylenediamine. In certain embodiments, the trialkoxysilyl is a trimethoxysilyl or triethoxysilyl group. In alternate embodiments, the trialkoxysilyl reagent is a trialkoxy alkylamine. In some embodiments, the trialkoxy alkylamine includes a primary, secondary, tertiary, or quaternary amine.

[0335] In certain embodiments, the trialkoxysilyl reagent includes a polyethyleneimine group. In specific embodiments, the polyethyleneimine is branched or unbranched. In alternate embodiments, the polyethyleneimine group has an average molecular weight of about 1000 to 20,000 Da, about 1,200 to 15,000 Da, about 1,500 to 12,000 Da, about 2,000 Da, about 3,000 Da, about 4,000 Da, about 5,000 Da, about 6,000 Da, about 7,000 Da, about 8,000 Da, about 9,000 Da, or about 10,000 Da, as measured by gel permeation chromatography (GPC). In some embodiments, the trialkoxysilyl reagent includes an C₁₋₂₀ alkylazide group. In certain embodiments, the trialkoxysilyl reagent includes an C₁₋₂₀ alkylcarboxylic acid group. In other embodiments, the trialkoxysilyl reagent includes a C₁₋₂₀ alkyl group.

[0336] A sulfhydryl modification on a MSP (e.g., MSR) may be prepared, for example, by treating the MSP with a sulfhydryl bearing trialkoxysilane compound, such as 3-mercaptopropyltriethoxysilane.

[0337] A disulfide modification on a MSP (e.g., MSR) may be prepared, for example, by treating the surface of the nanoparticle with a disulfide bearing trialkoxysilane compound, or by treating a sulfhydryl modified surface with 2,2′-dithiodipyridine or other disulfide. MSP (e.g., MSR) surface modifications to include a carboxylic acid group may be prepared, for example, by treating the surface with a carboxylic acid bearing trialkoxysilane compound, or by treating the MSP with a trialkoxysilane compound bearing a functional group that may be converted chemically into a carboxylic acid. For example, the MSP may be treated with 3-cyanopropyltriethoxysilane, followed by hydrolysis with sulfuric acid. MSP (e.g., MSR) surface modifications to include an epoxide will have at least one epoxide may be prepared, for example, by treating the MSP with an epoxide bearing trialkoxysilane compound, such as glycidoxypropyltriethoxysilane.

[0338] Surface modifications having a hydrophobic moiety will have at least one moiety intended to reduce the solubility in water, or increase the solubility in organic solvents. Examples of hydrophobic moieties include long chain alkyl groups (e.g., C₈-C₂₀ alkyl groups), fatty acid esters (e.g., C₁-C₂₂ alkyl acid esters), and aromatic rings having C₆-C₁₀ carbon atoms. In some embodiments, the reaction of the MSPs (e.g., MSRs) with the trialkoxysilyl reagent is carried out at ambient or room temperature. In other embodiments, the reaction is carried out at elevated temperatures. In further embodiments, the temperature of the reaction is from about 40° C. to about 120° C., about 50° C. to about 100° C., about 60° C. to about 80° C., about 70° C. to about 80° C., or about 50° C., about 55° C., about 60° C., about 65° C., about 70° C., about 75° C., about 80° C., about 85° C., about 90° C., about 95° C., or about 100° C.

[0339] Viral Vectors

[0340] In some embodiments, the compositions described herein can include an extended release agent, e.g., a mesoporous silica particle as described herein and a viral vector.

[0341] The viral vector can be any viral vector. Viral vector technology is well known in the art and is described, for example, in Sambrook et al., 2012, MOLECULAR CLONING: A LABORATORY MANUAL, volumes 1-4, Cold Spring Harbor Press, NY), and in other virology and molecular biology manuals. By way of example, the viral vector can be an adenovirus, a lentivirus, a retrovirus, an adeno-associated virus, or a herpesvirus. In some embodiments, the viral vector is a lentivirus vector or an adenovirus vector.

[0342] Vectors derived from retroviruses such as the lentivirus are suitable tools to achieve long-term gene transfer since they allow long-term, stable integration of a transgene and its propagation in daughter cells. Lentiviral vectors have the added advantage over vectors derived from onco-retroviruses such as murine leukemia viruses in that they can transduce non-proliferating cells, such as hepatocytes. They also have the added advantage of low immunogenicity. A retroviral vector may also be, e.g., a gammaretroviral vector. A gammaretroviral vector may include, e.g., a promoter, a packaging signal (W), a primer binding site (PBS), one or more (e.g., two) long terminal repeats (LTR), and a transgene of interest, e.g., a gene encoding a CAR. A gammaretroviral vector may lack viral structural gens such as gag, pol, and env. Exemplary gammaretroviral vectors include Murine Leukemia Virus (MLV), Spleen-Focus Forming Virus (SFFV), and Myeloproliferative Sarcoma Virus (MPSV), and vectors derived therefrom. Other gammaretroviral vectors are described, e.g., in Tobias Maetzig et al., “Gammaretroviral Vectors: Biology, Technology and Application” Viruses. 2011 June; 3(6): 677-713.

[0343] In another embodiment, the vector comprising the nucleic acid encoding the desired CAR of the invention is an adenoviral vector (A5/35). In another embodiment, the expression of nucleic acids encoding CARs can be accomplished using of transposons such as sleeping beauty, CRISPR, CAS9, and zinc finger nucleases. See June et al. 2009 Nature Reviews Immunology 9.10: 704-716, is incorporated herein by reference.

[0344] In some embodiments, the viral vector comprises an expression vector comprising a recombinant polynucleotide comprising an expression control sequence operatively linked to a nucleotide sequence to be expressed. In some embodiments, the nucleotide sequence expresses a chimeric antigen receptor (CAR), engineered TCR, cytokines, chemokines, shRNA to block an inhibitory molecule, or mRNA to induce expression of protein. In some embodiments, the protein is a CAR that comprises an antigen binding domain, a transmembrane domain, a costimulatory signaling region, and a signaling domain. In some embodiments, the signaling domain is a CD3 zeta signaling domain.

[0345] In some embodiments, the nucleotide sequence in the viral vector express a peptide engineered to target a tumor antigen. In some embodiments, the peptide targets a tumor antigen selected from the group consisting of: TSHR, CD19, CD123, CD22, CD30, CD171, CS-1, CLL-1, CD33, EGFRvIII, GD2, GD3, BCMA, Tn Ag, PSMA, ROR1, FLT3, FAP, TAG72, CD38, CD44v6, CEA, EPCAM, B7H3, KIT, IL-13Ra2, Mesothelin, IL-11Ra, PSCA, PRSS21, VEGFR2, LewisY, CD24, PDGFR-beta, SSEA-4, CD20, Folate receptor alpha, ERBB2 (Her2/neu), MUC1, EGFR, NCAM, Prostase, PAP, ELF2M, Ephrin B2, IGF-I receptor, CAIX, LMP2, gp100, bcr-abl, tyrosinase, EphA2, Fucosyl GM1, sLe, GM3, TGS5, HMWMAA, o-acetyl-GD2, Folate receptor beta, TEM1/CD248, TEM7R, CLDN6, GPRC5D, CXORF61, CD97, CD179a, ALK, Polysialic acid, PLAC1, GloboH, NY-BR-1, UPK2, HAVCR1, ADRB3, PANX3, GPR20, LY6K, OR51E2, TARP, WT1, NY-ESO-1, LAGE-1a, MAGE-A1, legumain, HPV E6,E7, MAGE A1, ETV6-AML, sperm protein 17, XAGE1, Tie 2, MAD-CT-1, MAD-CT-2, Fos-related antigen 1, p53, p53 mutant, prostein, survivin and telomerase, PCTA-1/Galectin 8, MelanA/MART1, Ras mutant, hTERT, sarcoma translocation breakpoints, ML-IAP, ERG (TMPRSS2 ETS fusion gene), NA17, PAX3, Androgen receptor, Cyclin B1, MYCN, RhoC, TRP-2, CYP1B1, BORIS, SART3, PAX5, OY-TES1, LCK, AKAP-4, SSX2, RAGE-1, human telomerase reverse transcriptase, RU1, RU2, intestinal carboxyl esterase, mut hsp70-2, CD79a, CD79b, CD72, LAIR1, FCAR, LILRA2, CD300LF, CLEC12A, BST2, EMR2, LY75, GPC3, FCRL5, IGLL1, and any combination thereof. In some embodiments, the peptide is a chimeric antigen receptor (CAR) or an engineered TCR. Such peptides are described in greater detail herein below in the section entitled General Description of Chimeric Antigen Receptor Technology.

[0346] In some embodiments, the nucleotide sequence in the vector expresses a protein engineered to target a tumor antigen. In some embodiments, the tumor antigen is chosen from one or more of: CD19; CD123; CD22; CD30; CD171; CS-1 (also referred to as CD2 subset 1, CRACC, SLAMF7, CD319, and 19A24); C-type lectin-like molecule-1 (CLL-1 or CLECL1); CD33; epidermal growth factor receptor variant III (EGFRvIII); ganglioside G2 (GD2); ganglioside GD3 (aNeu5Ac(2-8)aNeu5Ac(2-3)bDGalp(1-4)bDGlcp(1-1)Cer); TNF receptor family member B cell maturation (BCMA); Tn antigen ((Tn Ag) or (GalNAca-Ser/Thr)); prostate-specific membrane antigen (PSMA); Receptor tyrosine kinase-like orphan receptor 1 (ROR1); Fms-Like Tyrosine Kinase 3 (FLT3); Tumor-associated glycoprotein 72 (TAG72); CD38; CD44v6; Carcinoembryonic antigen (CEA); Epithelial cell adhesion molecule (EPCAM); B7H3 (CD276); KIT (CD 117); Interleukin-13 receptor subunit alpha-2 (IL-13Ra2 or CD213A2); Mesothelin; Interleukin 11 receptor alpha (IL-11Ra); prostate stem cell antigen (PSCA); Protease Serine 21 (Testisin or PRSS21); vascular endothelial growth factor receptor 2 (VEGFR2); Lewis(Y) antigen; CD24; Platelet-derived growth factor receptor beta (PDGFR-beta); Stage-specific embryonic antigen-4 (SSEA-4); CD20; Folate receptor alpha; Receptor tyrosine-protein kinase ERBB2 (Her2/neu); Mucin 1, cell surface associated (MUC1); epidermal growth factor receptor (EGFR); neural cell adhesion molecule (NCAM); Prostase; prostatic acid phosphatase (PAP); elongation factor 2 mutated (ELF2M); Ephrin B2; fibroblast activation protein alpha (FAP); insulin-like growth factor 1 receptor (IGF-I receptor), carbonic anhydrase IX (CAIX); Proteasome (Prosome, Macropain) Subunit, Beta Type, 9 (LMP2); glycoprotein 100 (gp100); oncogene fusion protein consisting of breakpoint cluster region (BCR) and Abelson murine leukemia viral oncogene homolog 1 (Abl) (bcr-abl); tyrosinase; ephrin type-A receptor 2 (EphA2); Fucosyl GM1; sialyl Lewis adhesion molecule (sLe); ganglioside GM3 (aNeu5Ac(2-3)bDGalp(1-4)bDGlcp(1-1)Cer); transglutaminase 5 (TGS5); high molecular weight-melanoma-associated antigen (HMWMAA); o-acetyl-GD2 ganglioside (OAcGD2); Folate receptor beta; tumor endothelial marker 1 (TEM1/CD248); tumor endothelial marker 7-related (TEM7R); claudin 6 (CLDN6); thyroid stimulating hormone receptor (TSHR); G protein-coupled receptor class C group 5, member D (GPRC5D); chromosome X open reading frame 61 (CXORF61); CD97; CD179a; anaplastic lymphoma kinase (ALK); Polysialic acid; placenta-specific 1 (PLAC1); hexasaccharide portion of globoH glycoceramide (GloboH); mammary gland differentiation antigen (NY-BR-1); uroplakin 2 (UPK2); Hepatitis A virus cellular receptor 1 (HAVCR1); adrenoceptor beta 3 (ADRB3); pannexin 3 (PANX3); G protein-coupled receptor 20 (GPR20); lymphocyte antigen 6 complex, locus K 9 (LY6K); Olfactory receptor 51E2 (OR51E2); TCR Gamma Alternate Reading Frame Protein (TARP); Wilms tumor protein (WT1); Cancer/testis antigen 1 (NY-ESO-1); Cancer/testis antigen 2 (LAGE-1a); Melanoma-associated antigen 1 (MAGE-A1); ETS translocation-variant gene 6, located on chromosome 12p (ETV6-AML); sperm protein 17 (SPA17); X Antigen Family, Member 1A (XAGE1); angiopoietin-binding cell surface receptor 2 (Tie 2); melanoma cancer testis antigen-1 (MAD-CT-1); melanoma cancer testis antigen-2 (MAD-CT-2); Fos-related antigen 1; tumor protein p53 (p53); p53 mutant; prostein; surviving; telomerase; prostate carcinoma tumor antigen-1 (PCTA-1 or Galectin 8), melanoma antigen recognized by T cells 1 (MelanA or MART1); Rat sarcoma (Ras) mutant; human Telomerase reverse transcriptase (hTERT); sarcoma translocation breakpoints; melanoma inhibitor of apoptosis (ML-IAP); ERG (transmembrane protease, serine 2 (TMPRSS2) ETS fusion gene); N-Acetyl glucosaminyl-transferase V (NA17); paired box protein Pax-3 (PAX3); Androgen receptor; Cyclin B1; v-myc avian myelocytomatosis viral oncogene neuroblastoma derived homolog (MYCN); Ras Homolog Family Member C (RhoC); Tyrosinase-related protein 2 (TRP-2); Cytochrome P450 1B1 (CYP1B1); CCCTC-Binding Factor (Zinc Finger Protein)-Like (BORIS or Brother of the Regulator of Imprinted Sites), Squamous Cell Carcinoma Antigen Recognized By T Cells 3 (SART3); Paired box protein Pax-5 (PAX5); proacrosin binding protein sp32 (OY-TES1); lymphocyte-specific protein tyrosine kinase (LCK); A kinase anchor protein 4 (AKAP-4); synovial sarcoma, X breakpoint 2 (SSX2); Receptor for Advanced Glycation End products (RAGE-1); renal ubiquitous 1 (RU1); renal ubiquitous 2 (RU2); legumain; human papilloma virus E6 (HPV E6); human papilloma virus E7 (HPV E7); intestinal carboxyl esterase; heat shock protein 70-2 mutated (mut hsp70-2); CD79a; CD79b; CD72; Leukocyte-associated immunoglobulin-like receptor 1 (LAIR1); Fc fragment of IgA receptor (FCAR or CD89); Leukocyte immunoglobulin-like receptor subfamily A member 2 (LILRA2); CD300 molecule-like family member f (CD300LF); C-type lectin domain family 12 member A (CLEC12A); bone marrow stromal cell antigen 2 (BST2); EGF-like module-containing mucin-like hormone receptor-like 2 (EMR2); lymphocyte antigen 75 (LY75); Glypican-3 (GPC3); Fc receptor-like 5 (FCRL5); and immunoglobulin lambda-like polypeptide 1 (IGLL1).

[0347] A CAR described herein can comprise an antigen binding domain (e.g., antibody or antibody fragment, TCR or TCR fragment) that binds to a tumor-supporting antigen (e.g., a tumor-supporting antigen as described herein). In some embodiments, the tumor-supporting antigen is an antigen present on a stromal cell or a myeloid-derived suppressor cell (MDSC). Stromal cells can secrete growth factors to promote cell division in the microenvironment. MDSC cells can inhibit T cell proliferation and activation. Without wishing to be bound by theory, in some embodiments, the CAR-expressing cells destroy the tumor-supporting cells, thereby indirectly inhibiting tumor growth or survival.

[0348] In some embodiments, the stromal cell antigen is chosen from one or more of: bone marrow stromal cell antigen 2 (BST2), fibroblast activation protein (FAP) and tenascin. In some embodiments, the FAP-specific antibody is, competes for binding with, or has the same CDRs as, sibrotuzumab. In embodiments, the MDSC antigen is chosen from one or more of: CD33, CD11b, C14, CD15, and CD66b. Accordingly, in some embodiments, the tumor-supporting antigen is chosen from one or more of: bone marrow stromal cell antigen 2 (BST2), fibroblast activation protein (FAP) or tenascin, CD33, CD11b, C14, CD15, and CD66b.

[0349] In some embodiments, the antigen binding domain of the encoded CAR molecule comprises an antibody, an antibody fragment, an scFv, a Fv, a Fab, a (Fab′)2, a single domain antibody (SDAB), a VH or VL domain, a camelid VHH domain or a bi-functional (e.g. bi-specific) hybrid antibody (e.g., Lanzavecchia et al., Eur. J. Immunol. 17, 105 (1987)).

[0350] In some instances, scFvs can be prepared according to method known in the art (see, for example, Bird et al., (1988) Science 242:423-426 and Huston et al., (1988) Proc. Natl. Acad. Sci. USA 85:5879-5883). ScFv molecules can be produced by linking VH and VL regions together using flexible polypeptide linkers. The scFv molecules comprise a linker (e.g., a Ser-Gly linker) with an optimized length and/or amino acid composition. The linker length can greatly affect how the variable regions of a scFv fold and interact. In fact, if a short polypeptide linker is employed (e.g., between 5-10 amino acids) intrachain folding is prevented. Interchain folding is also required to bring the two variable regions together to form a functional epitope binding site. For examples of linker orientation and size see, e.g., Hollinger et al. 1993 Proc Natl Acad. Sci. U.S.A. 90:6444-6448, U.S. Patent Application Publication Nos. 2005/0100543, 2005/0175606, 2007/0014794, and PCT publication Nos. WO2006/020258 and WO2007/024715, is incorporated herein by reference.

[0351] An scFv can comprise a linker of at least 1, 2, 3, 4, 5, 6, 7, 8, 9, 10, 11, 12, 13, 14, 15, 16, 17, 18, 19, 20, 25, 30, 35, 40, 45, 50, or more amino acid residues between its VL and VH regions. The linker sequence may comprise any naturally occurring amino acid. In some embodiments, the linker sequence comprises amino acids glycine and serine. In another embodiment, the linker sequence comprises sets of glycine and serine repeats such as (Gly₄Ser)n, where n is a positive integer equal to or greater than 1 (SEQ ID NO: 22). In some embodiments, the linker can be (Gly₄Ser)₄ (SEQ ID NO:29) or (Gly₄Ser)₃(SEQ ID NO:30). Variation in the linker length may retain or enhance activity, giving rise to superior efficacy in activity studies. In another aspect, the antigen binding domain is a T cell receptor (“TCR”), or a fragment thereof, for example, a single chain TCR (scTCR). Methods to make such TCRs are known in the art. See, e.g., Willemsen R A et al, Gene Therapy 7: 1369-1377 (2000); Zhang T et al, Cancer Gene Ther 11: 487-496 (2004); Aggen et al, Gene Ther. 19(4):365-74 (2012) (references are incorporated herein by its entirety). For example, scTCR can be engineered that contains the Vα and Vβ genes from a T cell clone linked by a linker (e.g., a flexible peptide). This approach is very useful to cancer associated target that itself is intracellular, however, a fragment of such antigen (peptide) is presented on the surface of the cancer cells by MHC.

In certain embodiments, the encoded antigen binding domain has a binding affinity KD of 10⁻⁴ M to 10⁻⁸ M.

[0352] In some embodiments, the encoded CAR molecule comprises an antigen binding domain that has a binding affinity KD of 10⁻⁴ M to 10⁻⁸ M, e.g., 10⁻⁵ M to 10⁻⁷ M, e.g., 10⁻⁶ M or 10⁻⁷ M, for the target antigen. In some embodiments, the antigen binding domain has a binding affinity that is at least five-fold, 10-fold, 20-fold, 30-fold, 50-fold, 100-fold or 1,000-fold less than a reference antibody, e.g., an antibody described herein. In some embodiments, the encoded antigen binding domain has a binding affinity at least 5-fold less than a reference antibody (e.g., an antibody from which the antigen binding domain is derived). In some aspects such antibody fragments are functional in that they provide a biological response that can include, but is not limited to, activation of an immune response, inhibition of signal-transduction origination from its target antigen, inhibition of kinase activity, and the like, as will be understood by a skilled artisan.

[0353] In some aspects, the antigen binding domain of the CAR is a scFv antibody fragment that is humanized compared to the murine sequence of the scFv from which it is derived.

In some aspects, the antigen binding domain of a CAR of the invention (e.g., a scFv) is encoded by a nucleic acid molecule whose sequence has been codon optimized for expression in a mammalian cell. In some aspects, entire CAR construct of the invention is encoded by a nucleic acid molecule whose entire sequence has been codon optimized for expression in a mammalian cell. Codon optimization refers to the discovery that the frequency of occurrence of synonymous codons (i.e., codons that code for the same amino acid) in coding DNA is biased in different species. Such codon degeneracy allows an identical polypeptide to be encoded by a variety of nucleotide sequences. A variety of codon optimization methods is known in the art, and include, e.g., methods disclosed in at least U.S. Pat. Nos. 5,786,464 and 6,114,148.

[0354] In some embodiments involving immune effector cells engineered to express a CAR molecule, e.g., as described herein, it is understood that the treatment method may further include any of the steps, aspects or features described below in the section relating to Chimeric Antigen Receptors.

[0355] The cells are preferably immune effector cells. In some embodiments, the cells are T cells. In some embodiments, the cells are NK cells. In embodiments, the invention relates to a population of cells of the invention, e.g., a population of immune effector cells of the invention. In embodiments, the population of cells of the invention comprises cells of the type indicated, and may comprise other types (e.g., a population of immune effector cells, e.g., T cells, engineered to express a CAR molecule, e.g., as described herein, may include T cells engineered to express a CAR molecule as well as T cells (or other cell types) that have not been engineered to express a CAR molecule). In embodiments, the population of cells used in the methods of the invention consists essentially of cells of the type indicated. In embodiments, the population of cells of the invention is substantially free of other cell types. In embodiments, the population of cells of the invention consists of the indicated cell type.

[0356] In any of the foregoing aspects and embodiments, the cells and/or population of cells are or include immune effector cells, e.g., the population of immune effector cells includes, e.g., consists of, T cells or NK cells. In embodiments the cells are T cells, e.g., CD8+ T cells, CD4+T cells, or a combination thereof. In embodiments the cells are NK cells.

In embodiments the cells are human cells. In embodiments, the cells are autologous, e.g., to the subject to be administered the cells. In embodiments, the cells are allogeneic, e.g., to the subject to be administered the cells.

[0357] In general, in the methods described herein, the compositions described herein may be administered in therapeutically effective amounts as described above via any of the usual and acceptable modes known in the art, either singly or in combination with one or more therapeutic agents. In particular embodiments, the compositions are administered by injection. In still particular embodiments, for in vivo administration, the compositions are administered subcutaneously to a subject in need thereof. In other embodiments, the compositions may be administered in the form of an implant at the desired site of action. The site of action may be determined by a person of skill in the art in accordance with the needs of the subject.

### CAR Targets

[0358] Described herein are viral vectors to transduce immune effector cells (e.g., T cells, NK cells) that are engineered to contain one or more CARs that direct the immune effector cells to undesired cells (e.g., cancer cells). This is achieved through an antigen binding domain on the CAR that is specific for a cancer associated antigen. There are two classes of cancer associated antigens (tumor antigens) that can be targeted by the CARs of the instant invention: (1) cancer associated antigens that are expressed on the surface of cancer cells; and (2) cancer associated antigens that itself is intracellular, however, a fragment of such antigen (peptide) is presented on the surface of the cancer cells by MHC (major histocompatibility complex).

[0359] In some embodiments, the tumor antigen is chosen from one or more of: CD19; CD123; CD22; CD30; CD171; CS-1 (also referred to as CD2 subset 1, CRACC, SLAMF7, CD319, and 19A24); C-type lectin-like molecule-1 (CLL-1 or CLECL1); CD33; epidermal growth factor receptor variant III (EGFRvIII); ganglioside G2 (GD2); ganglioside GD3 (aNeu5Ac(2-8)aNeu5Ac(2-3)bDGalp(1-4)bDGlcp(1-1)Cer); TNF receptor family member B cell maturation (BCMA); Tn antigen ((Tn Ag) or (GalNAca-Ser/Thr)); prostate-specific membrane antigen (PSMA); Receptor tyrosine kinase-like orphan receptor 1 (ROR1); Fms-Like Tyrosine Kinase 3 (FLT3); Tumor-associated glycoprotein 72 (TAG72); CD38; CD44v6; Carcinoembryonic antigen (CEA); Epithelial cell adhesion molecule (EPCAM); B7H3 (CD276); KIT (CD 117); Interleukin-13 receptor subunit alpha-2 (IL-13Ra2 or CD213A2); Mesothelin; Interleukin 11 receptor alpha (IL-11Ra); prostate stem cell antigen (PSCA); Protease Serine 21 (Testisin or PRSS21); vascular endothelial growth factor receptor 2 (VEGFR2); Lewis(Y) antigen; CD24; Platelet-derived growth factor receptor beta (PDGFR-beta); Stage-specific embryonic antigen-4 (SSEA-4); CD20; Folate receptor alpha; Receptor tyrosine-protein kinase ERBB2 (Her2/neu); Mucin 1, cell surface associated (MUC1); epidermal growth factor receptor (EGFR); neural cell adhesion molecule (NCAM); Prostase; prostatic acid phosphatase (PAP); elongation factor 2 mutated (ELF2M); Ephrin B2; fibroblast activation protein alpha (FAP); insulin-like growth factor 1 receptor (IGF-I receptor), carbonic anhydrase IX (CAIX); Proteasome (Prosome, Macropain) Subunit, Beta Type, 9 (LMP2); glycoprotein 100 (gp100); oncogene fusion protein consisting of breakpoint cluster region (BCR) and Abelson murine leukemia viral oncogene homolog 1 (Abl) (bcr-abl); tyrosinase; ephrin type-A receptor 2 (EphA2); Fucosyl GM1; sialyl Lewis adhesion molecule (sLe); ganglioside GM3 (aNeu5Ac(2-3)bDGalp(1-4)bDGlcp(1-1)Cer); transglutaminase 5 (TGS5); high molecular weight-melanoma-associated antigen (HMWMAA); o-acetyl-GD2 ganglioside (OAcGD2); Folate receptor beta; tumor endothelial marker 1 (TEM1/CD248); tumor endothelial marker 7-related (TEM7R); claudin 6 (CLDN6); thyroid stimulating hormone receptor (TSHR); G protein-coupled receptor class C group 5, member D (GPRC5D); chromosome X open reading frame 61 (CXORF61); CD97; CD179a; anaplastic lymphoma kinase (ALK); Polysialic acid; placenta-specific 1 (PLAC1); hexasaccharide portion of globoH glycoceramide (GloboH); mammary gland differentiation antigen (NY-BR-1); uroplakin 2 (UPK2); Hepatitis A virus cellular receptor 1 (HAVCR1); adrenoceptor beta 3 (ADRB3); pannexin 3 (PANX3); G protein-coupled receptor 20 (GPR20); lymphocyte antigen 6 complex, locus K 9 (LY6K); Olfactory receptor 51E2 (OR51E2); TCR Gamma Alternate Reading Frame Protein (TARP); Wilms tumor protein (WT1); Cancer/testis antigen 1 (NY-ESO-1); Cancer/testis antigen 2 (LAGE-1a); Melanoma-associated antigen 1 (MAGE-A1); ETS translocation-variant gene 6, located on chromosome 12p (ETV6-AML); sperm protein 17 (SPA17); X Antigen Family, Member 1A (XAGE1); angiopoietin-binding cell surface receptor 2 (Tie 2); melanoma cancer testis antigen-1 (MAD-CT-1); melanoma cancer testis antigen-2 (MAD-CT-2); Fos-related antigen 1; tumor protein p53 (p53); p53 mutant; prostein; surviving; telomerase; prostate carcinoma tumor antigen-1 (PCTA-1 or Galectin 8), melanoma antigen recognized by T cells 1 (MelanA or MART1); Rat sarcoma (Ras) mutant; human Telomerase reverse transcriptase (hTERT); sarcoma translocation breakpoints; melanoma inhibitor of apoptosis (ML-IAP); ERG (transmembrane protease, serine 2 (TMPRSS2) ETS fusion gene); N-Acetyl glucosaminyl-transferase V (NA17); paired box protein Pax-3 (PAX3); Androgen receptor; Cyclin B1; v-myc avian myelocytomatosis viral oncogene neuroblastoma derived homolog (MYCN); Ras Homolog Family Member C (RhoC); Tyrosinase-related protein 2 (TRP-2); Cytochrome P450 1B1 (CYP1B1); CCCTC-Binding Factor (Zinc Finger Protein)-Like (BORIS or Brother of the Regulator of Imprinted Sites), Squamous Cell Carcinoma Antigen Recognized By T Cells 3 (SART3); Paired box protein Pax-5 (PAX5); proacrosin binding protein sp32 (OY-TES1); lymphocyte-specific protein tyrosine kinase (LCK); A kinase anchor protein 4 (AKAP-4); synovial sarcoma, X breakpoint 2 (SSX2); Receptor for Advanced Glycation End products (RAGE-1); renal ubiquitous 1 (RU1); renal ubiquitous 2 (RU2); legumain; human papilloma virus E6 (HPV E6); human papilloma virus E7 (HPV E7); intestinal carboxyl esterase; heat shock protein 70-2 mutated (mut hsp70-2); CD79a; CD79b; CD72; Leukocyte-associated immunoglobulin-like receptor 1 (LAIR1); Fc fragment of IgA receptor (FCAR or CD89); Leukocyte immunoglobulin-like receptor subfamily A member 2 (LILRA2); CD300 molecule-like family member f (CD300LF); C-type lectin domain family 12 member A (CLEC12A); bone marrow stromal cell antigen 2 (BST2); EGF-like module-containing mucin-like hormone receptor-like 2 (EMR2); lymphocyte antigen 75 (LY75); Glypican-3 (GPC3); Fc receptor-like 5 (FCRL5); and immunoglobulin lambda-like polypeptide 1 (IGLL1).

[0360] CD19

[0361] An non-limiting exemplary tumor antigen is CD19. CARs that bind to CD19 are known in the art. For example, those disclosed in WO2012/079000 and WO2014/153270. Any known CD19 CAR, for example, the CD19 antigen binding domain of any known CD19 CAR, in the art can be used in accordance with the present disclosure. For example, LG-740; CD19 CAR described in the U.S. Pat. Nos. 8,399,645; 7,446,190; Xu et al., Leuk Lymphoma. 2013 54(2):255-260(2012); Cruz et al., Blood 122(17):2965-2973 (2013); Brentjens et al., Blood, 118(18):4817-4828 (2011); Kochenderfer et al., Blood 116(20):4099-102 (2010); Kochenderfer et al., Blood 122 (25):4129-39(2013); and 16th Annu Meet Am Soc Gen Cell Ther (ASGCT) (May 15-18, Salt Lake City) 2013, Abst 10.

[0362] Non-limiting exemplary CD19 CARs include CD19 CARs described herein or an anti-CD19 CAR described in Xu et al. Blood 123.24(2014):3750-9; Kochenderfer et al. Blood 122.25(2013):4129-39, Cruz et al. Blood 122.17(2013):2965-73, NCT00586391, NCT01087294, NCT02456350, NCT00840853, NCT02659943, NCT02650999, NCT02640209, NCT01747486, NCT02546739, NCT02656147, NCT02772198, NCT00709033, NCT02081937, NCT00924326, NCT02735083, NCT02794246, NCT02746952, NCT01593696, NCT02134262, NCT01853631, NCT02443831, NCT02277522, NCT02348216, NCT02614066, NCT02030834, NCT02624258, NCT02625480, NCT02030847, NCT02644655, NCT02349698, NCT02813837, NCT02050347, NCT01683279, NCT02529813, NCT02537977, NCT02799550, NCT02672501, NCT02819583, NCT02028455, NCT01840566, NCT01318317, NCT01864889, NCT02706405, NCT01475058, NCT01430390, NCT02146924, NCT02051257, NCT02431988, NCT01815749, NCT02153580, NCT01865617, NCT02208362, NCT02685670, NCT02535364, NCT02631044, NCT02728882, NCT02735291, NCT01860937, NCT02822326, NCT02737085, NCT02465983, NCT02132624, NCT02782351, NCT01493453, NCT02652910, NCT02247609, NCT01029366, NCT01626495, NCT02721407, NCT01044069, NCT00422383, NCT01680991, NCT02794961, or NCT02456207, each of which is incorporated herein by reference in its entirety.

In some embodiments, the CD19 CAR comprises the fusion polypeptide sequence provided as SEQ ID NO: 12 in WO2012/079000, which provides an scFv fragment of murine origin that specifically binds to human CD19.
In some embodiments, the CD19 CAR comprises an amino acid sequence provided as SEQ ID NO: 12 in WO2012/079000.

[0363] In some embodiments, the CD19 CAR comprises the amino acid sequence: digmtqttsslsaslgdrvtiscrasqdiskylnwyqqkpdgtvklliyhtsrlhsgvpsrfsgsgsgtdysltisnleqediatyfcqqgntl pytfgggtkleitggggsggggsggggsevklgesgpglvapsqslsvtctvsgvslpdygvswirqpprkglewlgviwgsettyyn salksrltiikdnsksqvflkmnslqtddtaiyycakhyyyggsyamdywgqgtsvtvsstttpaprpptpaptiasqplslrpeacrpa aggavhtrgldfacdiyiwaplagtcgvlllslvitlyckrgrkkllyifkqpfmrpvqttgeedgcscrfpeeeeggcelrvkfsrsadap aykqgqnglynelnlgrreeydvldkrrgrdpemggkprrknpqeglynelqkdkmaeayseigmkgerrrgkghdglyqglstat kdtydalhmqalppr (SEQ ID NO: 757), or a sequence substantially homologous thereto.

[0364] In some embodiments, the CD19 CAR comprises the amino acid sequence:

(SEQ ID NO: 758)
eivmtqspatlslspgeratlscrasqdiskylnwyqqkpgqaprlliyh
tsrlhsgiparfsgsgsgtdytltisslqpedfavyfcqqgntlpytfgq
gtkleikggggsggggsggggsqvqlqesgpglvkpsetlsltctvsgvs
lpdygvswirqppgkglewigviwgsettyyqsslksrvtiskdnsknqv
slklssvtaadtavyycakhyyyggsyamdywgqgtlvtvss

[0365] In some embodiments, the CD19 CAR is a humanized CD19 CAR comprising the amino acid sequence:

(SEQ ID NO: 759)
eivmtqspatlslspgeratlscrasqdiskylnwyqqkpgqaprlliyh
tsrlhsgiparfsgsgsgtdytltisslqpedfavyfcqqgntlpytfgq
gtkleikggggsggggsggggsqvqlqesgpglvkpsetlsltctvsgvs
lpdygvswirqppgkglewigviwgsettyyqsslksrvtiskdnsknqv
slklssvtaadtavyycakhyyyggsyamdywgqgtlvtvsstttpaprp
ptpaptiasqplslrpeacrpaaggavhtrgldfacdiyiwaplagtcgv
lllslvitlyckrgrkkllyifkqpfmrpvqttqeedgcscrfpeeeegg
celrvkfsrsadapaykqgqnqlynelnlgrreeydvldkrrgrdpemgg
kprrknpqeglynelqkdkmaeayseigmkgerrrgkghdglyqglstat
kdtydalhmqalppr

[0366] In some embodiments, CD19 CARs comprise a sequence, for example, a CDR, VH, VL, scFv, or full-CAR sequence, disclosed in Table 1 below, or a sequence having at least 80%, 85%, 90%, 95%, or 99% identity thereto.

TABLE 1
Amino acid sequences of exemplary anti-CD19 molecules

| SEQ ID | | |
|---|---|---|
| NO | Region | Sequence |
| CTL019 | | |
| 760 | HCDR1 | DYGVS |
| | (Kabat) | |
| 761 | HCDR2 | VIWGSETTYYNSALKS |
| | (Kabat) | |
| 762 | HCDR3 | HYYYGGSYAMDY |
| | (Kabat) | |
| 763 | LCDR1 | RASQDISKYLN |
| | (Kabat) | |
| 764 | LCDR2 | HTSRLHS |
| | (Kabat) | |
| 765 | LCDR3 | QQGNTLPYT |
| | (Kabat) | |
| 766 | CTL019 | MALPVTALLLPLALLLHAARPdiqmtqttsslsaslgdrvtiscrasqdis |
| | Full amino | kylnwyqqkpdgtvklliyhtsrlhsgvpsrfsgsgsgtdysltisnleqediatyfcqqg |
| | acid | ntlpytfgggtkleitggggsggggggggsevklqesgpglvapsqslsvtctvsgvsl |
| | sequence | pdygvswirqpprkglewlgviwgsettyynsalksrltiikdnsksqvflkmnslqtd |
| | | dtaiyycakhyyyggsyamdywgqgtsvtvsstttpaprpptpaptiasqplslrpeac |
| | | rpaaggavhtrgldfacdiyiwaplagtcgvlllslvitlyckrgrkkllyifkqpfmrpvq |
| | | ttqeedgccrfpeeeeggcelrvkfsrsadapaykqgqnqlynelnlgrreeydvldkr |
| | | rgrdpemggkprrknpqeglynelqkdkmaeayseigmkgerrrgkghdglyqgls |
| | | tatkdtydalhmqalppr |
| 685 | CTL019 | atggccttaccagtgaccgccttgctcctgccgctggccttgctgctccacgccgccaggc |
| | Full | cggacatccagatgacacagactacatcctccctgtctgcctctctgggagacagagtcac |
| | nucleotide | catcagttgcagggcaagtcaggacattagtaaatatttaaattggtatcagcagaaaccag |
| | sequence | atggaactgttaaactcctgatctaccatacatcaagattacactcaggagtcccatcaaggt |
| | | tcagtggcagtgggtctggaacagattattctctcaccattagcaacctggagcaagaagat |
| | | attgccacttacttttgccaacagggtaatacgcttccgtacacgttcggaggggggaccaa |
| | | gctggagatcacaggtggcggtggctcgggcggtggtgggtcgggtggcggcggatct |
| | | gaggtgaaactgcaggagtcaggacctggcctggtggcgccctcacagagcctgtccgt |
| | | cacatgcactgtctcaggggtctcattacccgactatggtgtaagctggattcgccagcctc |
| | | cacgaaagggtctggagtggctgggagtaatatggggtagtgaaaccacatactataattc |
| | | agctctcaaatccagactgaccatcatcaaggacaactccaagagccaagttttcttaaaaat |
| | | gaacagtctgcaaactgatgacacagccatttactactgtgccaaacattattactacggtgg |
| | | tagctatgctatggactactggggccaaggaacctcagtcaccgtctcctcaaccacgacg |
| | | ccagcgccgcgaccaccaacaccggcgcccaccatcgcgtcgcagcccctgtccctgc |
| | | gcccagaggcgtgccggccagcggggggggcgcagtgcacacgagggggctggac |
| | | ttcgcctgtgatatctacatctgggcgcccttggccgggacttgtggggtccttctcctgtcac |
| | | tggttatcaccctttactgcaaacggggcagaaagaaactcctgtatatattcaaacaaccat |
| | | ttatgagaccagtacaaactactcaagaggaagatggctgtagctgccgatttccagaaga |
| | | agaagaaggaggatgtgaactgagagtgaagttcagcaggagcgcagacgcccccgcg |
| | | tacaagcagggccagaaccagctctataacgagctcaatctaggacgaagagaggagta |
| | | cgatgttttggacaagagacgtggccgggaccctgagatggggggaaagccgagaagg |
| | | aagaaccctcaggaaggcctgtacaatgaactgcagaaagataagatggcggaggccta |
| | | cagtgagattgggatgaaaggcgagcgccggaggggcaaggggcacgatggcctttac |
| | | cagggtctcagtacagccaccaaggacacctacgacgcccttcacatgcaggccctgccc |
| | | cctcgc |
| 686 | CTL019 | Diqmtqttsslsaslgdrvtiscrasqdiskylnwyqqkpdgtvklliyhtsrlhsgvpsrf |
| | scFv | sgsgsgtdysltisnleqediatyfcqqgntlpytfgggtkleitggggsggggsggggse |
| | domain | vklqesgpglvapsqslsvtctvsgvslpdygvswirqpprkglewlgviwgsettyyn |
| | | salksrltiikdnsksqvflkmnslqtddtaiyycakhyyyggsyamdywgqgtsvtv |
| | | ss |
| Humanized | | |
| CAR2 | | |
| 760 | HCDR1 | DYGVS |
| | (Kabat) | |
| 687 | HCDR2 | VIWGSETTYYQSSLKS |
| | (Kabat) | |
| 762 | HCDR3 | HYYYGGSYAMDY |
| | (Kabat) | |
| 763 | LCDR1 | RASQDISKYLN |
| | (Kabat) | |
| 764 | LCDR2 | HTSRLHS |
| | (Kabat) | |
| 76— | LCDR3 | QQGNTLPYT |
| | (Kabat) | |
| 758 | CAR2 scFv | EIVMTQSPATLSLSPGERATLSCRASQDISKYLNWYQQKP |
| | domain - aa | GQAPRLLIYHTSRLHSGIPARFSGSGSGTDYTLTISSLQPED |
| | (Linker is | FAVYFCQQGNTLPYTFGQGTKLEIKGGGGSGGGGSGGGG |
| | underlined) | SQVQLQESGPGLVKPSETLSLTCTVSGVSLPDYGVSWIRQ |
| | | PPGKGLEWIGVIWGSETTYYQSSLKSRVTISKDNSKNQVS |
| | | LKLSSVTAADTAV- |
| | | YCAKHYYYGGSYAMDYWGQGTLVTVSS |
| 688 | CAR2 scFv | atggccctccctgtcaccgccctgctgcttccgctggctcttctgctccacgccgctcggcc |
| | domain - nt | cgaaattgtgatgacccagtcacccgccactcttagcctttcacccggtgagcgcgcaacc |
| | | ctgtcttgcagagcctcccaagacatctcaaaataccttaattggtatcaacagaagcccgg |
| | | acaggctcctcgccttctgatctaccacaccagccggctccattctggaatccctgccaggt |
| | | tcagcggtagcggatctgggaccgactacaccctcactatcagctcactgcagccagagg |
| | | acttcgctgtctatttctgtcagcaagggaacaccctgccctacacctttggacagggcacc |
| | | aagctcgagattaaaggtggaggtggcagcggaggaggtgggtccggcggtggaggaa |
| | | gccaggtccaactccaagaaagcggaccgggtcttgtgaagccatcagaaactctttcact |
| | | gacttgtactgtgagcggagtgtctctccccgattacggggtgtcttggatcagacagccac |
| | | cggggaagggtctggaatggattggagtgatttggggctctgagactacttactaccaatca |
| | | tccctcaagtcacgcgtcaccatctcaaaggacaactctaagaatcaggtgtcactgaaact |
| | | gtcatctgtgaccgcagccgacaccgccgtgtactattgcgctaagcattactattatggcg |
| | | ggagctacgcaatggattactggggacagggtactctggtcaccgt- |
| | | tccagccaccaccatcatcaccatcaccat |
| 689 | CAR 2 - | MALPVTALLLPLALLLHAARPEIVMTQSPATLSLSPGERA |
| | Full - aa | TLSCRASQDISKYLNWYQQKPGQAPRLLIYHTSRLHSGIP |
| | | ARFSGSGSGTDYTLTISSLQPEDFAVYFCQQGNTLPYTFG |
| | | QGTKLEIKGGGGSGGGGSGGGGSQVQLQESGPGLVKPSE |
| | | TLSLTCTVSGVSLPDYGVSWIRQPPGKGLEWIGVIWGSET |
| | | TYYQSSLKSRVTISKDNSKNQVSLKLSSVTAADTAVYYC |
| | | AKHYYYGGSYAMDYWGQGTLVTVSSTTTPAPRPPTPAP |
| | | TIASQPLSLRPEACRPAAGGAVHTRGLDFACDIYIWAPLA |
| | | GTCGVLLLSLVITLYCKRGRKKLLYIFKQPFMRPVQTTQE |
| | | EDGCSCRFPEEEEGGCELRVKFSRSADAPAYKQGQNQLY |
| | | NELNLGRREEYDVLDKRRGRDPEMGGKPRRKNPQEGLY |
| | | NELQKDKMAEAYSEIGMKGERR- |
| | | GKGHDGLYQGLSTATKDTYDALHMQALPPR |
| 690 | CAR 2 - | atggccctccctgtcaccgccctgctgcttccgctggctcttctgctccacgccgctcggcc |
| | Full - nt | cgaaattgtgatgacccagtcacccgccactcttagcctttcacccggtgagcgcgcaacc |
| | | ctgtcttgcagagcctcccaagacatctcaaaataccttaattggtatcaacagaagcccgg |
| | | acaggctcctcgccttctgatctaccacaccagccggctccattctggaatccctgccaggt |
| | | tcagcggtagcggatctgggaccgactacaccctcactatcagctcactgcagccagagg |
| | | acttcgctgtctatttctgtcagcaagggaacaccctgccctacacctttggacagggcacc |
| | | aagctcgagattaaaggtggaggtggcagcggaggaggtgggtccggcggtggaggaa |
| | | gccaggtccaactccaagaaagcggaccgggtcttgtgaagccatcagaaactctttcact |
| | | gacttgtactgtgagcggagtgtctctccccgattacggggtgtcttggatcagacagccac |
| | | cggggaagggtctggaatggattggagtgatttggggctctgagactacttactaccaatca |
| | | tccctcaagtcacgcgtcaccatctcaaaggacaactctaagaatcaggtgtcactgaaact |
| | | gtcatctgtgaccgcagccgacaccgccgtgtactattgcgctaagcattactattatggcg |
| | | ggagctacgcaatggattactggggacagggtactctggtcaccgtgtccagcaccactac |
| | | cccagcaccgaggccacccaccccggctcctaccatcgcctcccagcctctgtccctgcg |
| | | tccggaggcatgtagacccgcagctggtggggccgtgcatacccggggtcttgacttcgc |
| | | ctgcgatatctacatttgggcccctctggctggtacttgcggggtcctgctgctttcactcgtg |
| | | atcactctttactgtaagcgcggtcggaagaagctgctgtacatctttaagcaacccttcatg |
| | | aggcctgtgcagactactcaagaggaggacggctgttcatgccggttcccagaggagga |
| | | ggaaggcggctgcgaactgcgcgtgaaattcagccgcagcgcagatgctccagcctaca |
| | | agcaggggcagaaccagctctacaacgaactcaatcttggtcggagagaggagtacgac |
| | | gtgctggacaagcggagaggacgggacccagaaatgggcgggaagccgcgcagaaa |
| | | gaatccccaagagggcctgtacaacgagctccaaaaggataagatggcagaagcctata |
| | | gcgagattggtatgaaaggggaacgcagaagaggcaaaggccacgacggactgtacca |
| | | gggactcagcaccgccaccaaggacacctatgacgctcttcacatgcaggccctgccgcc |
| | | tcgg |
| 349 | CAR 2A- | MALPVTALLLPLALLLHAARPEIVMTQSPATLSLSPGERATLSCRASQ |
| | Full amino | DISKYLNWYQQKPGQAPRLLIYHTSRLHSGIPARFSGSGSGTDYTLTIS |
| | acid | SLQPEDFAVYFCQQGNTLPYTFGQGTKLEIKGGGGSGGGGSGGGGSQ |
| | sequence; | VQLQESGPGLVKPSETLSLTCTVSGVSLPDYGVSWIRQPPGKGLEWIG |
| | signal | VIWGSETTYYQSSLKSRVTISKDNSKNQVSLKLSSVTAADTAVYYCA |
| | peptide | KHYYYGGSYAMDYWGQGTLVTVSSTTTPAPRPPTPAPTIASQPLSLRP |
| | underlined | EACRPAAGGAVHTRGLDFACDIYIWAPLAGTCGVLLLSLVITLYCKR |
| | | GRKKLLYIFKQPFMRPVQTTQEEDGCSCRFPEEEEGGCELRVKFSRSA |
| | | DAPAYQQGQNQLYNELNLGRREEYDVLDKRRGRDPEMGGKPRRKN |
| | | PQEGLYNELQKDKMAEAYSEIGMKGERRRGKGHDGLYQGLSTATKD |
| | | TYDALHMQALPPR |
| 225 | CAR 2A - | EIVMTQSPATLSLSPGERATLSCRASQDISKYLNWYQQKPGQAPRLLI |
| | amino acid | YHTSRLHSGIPARFSGSGSGTDYTLTISSLQPEDFAVYFCQQGNTLPYT |
| | sequence; | FGQGTKLEIKGGGGSGGGGSGGGGSQVQLQESGPGLVKPSETLSLTC |
| | no signal | TVSGVSLPDYGVSWIRQPPGKGLEWIGVIWGSETTYYQSSLKSRVTIS |
| | peptide | KDNSKNQVSLKLSSVTAADTAVYYCAKHYYYGGSYAMDYWGQGT |
| | | LVTVSSTTTPAPRPPTPAPTIASQPLSLRPEACRPAAGGAVHTRGLDFA |
| | | CDIYIWAPLAGTCGVLLLSLVITLYCKRGRKKLLYIFKQPFMRPVQTT |
| | | QEEDGCSCRFPEEEEGGCELRVKFSRSADAPAYQQGQNQLYNELNLG |
| | | RREEYDVLDKRRGRDPEMGGKPRRKNPQEGLYNELQKDKMAEAYS |
| | | EIGMKGERRRGKGHDGLYQGLSTATKDTYDALHMQALPPR |
| 354 | CAR 2A | atggccctccctgtcaccgccctgctgcttccgctggctcttctgctccacgccgctcggcccgaaattgtgatg |
| | full nucleic | acccagtcacccgccactcttagcctttcacccggtgagcgcgcaaccctgtcttgcagagcctcccaagacat |
| | acid | ctcaaaataccttaattggtatcaacagaagcccggacaggctcctcgccttctgatctaccacaccagccggc |
| | sequence; | tccattctggaatccctgccaggttcagcggtagcggatctgggaccgactacaccctcactatcagctcactg |
| | signal | cagccagaggacttcgctgtctatttctgtcagcaagggaacaccctgccctacacctttggacagggcaccaa |
| | peptide and | gctcgagattaaaggtggaggtggcagcggaggaggtgggtccggcggtggaggaagccaggtccaactc |
| | stop codon | caagaaagcggaccgggtcttgtgaagccatcagaaactctttcactgacttgtactgtgagcggagtgtctctc |
| | underlined | cccgattacggggtgtcttggatcagacagccaccggggaagggtctggaatggattggagtgatttggggct |
| | | ctgagactacttactaccaatcatccctcaagtcacgcgtcaccatctcaaaggacaactctaagaatcaggtgt |
| | | cactgaaactgtcatctgtgaccgcagccgacaccgccgtgtactattgcgctaagcattactattatggcggga |
| | | gctacgcaatggattactggggacagggtactctggtcaccgtgtccagcaccactaccccagcaccgaggc |
| | | cacccaccccggctcctaccatcgcctcccagcctctgtccctgcgtccggaggcatgtagacccgcagctg |
| | | gtggggccgtgcatacccggggtcttgacttcgcctgcgatatctacatttgggcccctctggctggtacttgcg |
| | | gggtcctgctgctttcactcgtgatcactctttactgtaagcgcggtcggaagaagctgctgtacatctttaagca |
| | | acccttcatgaggcctgtgcagactactcaagaggaggacggctgttcatgccggttcccagaggaggagga |
| | | aggcggctgcgaactgcgcgtgaaattcagccgcagcgcagatgctccagcctaccagcaggggcagaac |
| | | cagctctacaacgaactcaatcttggtcggagagaggagtacgacgtgctggacaagcggagaggacggga |
| | | cccagaaatgggcgggaagccgcgcagaaagaatccccaagagggcctgtacaacgagctccaaaaggat |
| | | aagatggcagaagcctatagcgagattggtatgaaaggggaacgcagaagaggcaaaggccacgacggac |
| | | tgtaccagggactcagcaccgccaccaaggacacctatgacgctcttcacatgcaggccctgccgcctcggt |
| | | aa |
| 355 | CAR 2A | atggccctccctgtcaccgccctgctgcttccgctggctcttctgctccacgccgctcggcccgaaattgtgatg |
| | nucleic | acccagtcacccgccactcttagcctttcacccggtgagcgcgcaaccctgtcttgcagagcctcccaagacat |
| | acid | ctcaaaataccttaattggtatcaacagaagcccggacaggctcctcgccttctgatctaccacaccagccggc |
| | sequence; | tccattctggaatccctgccaggttcagcggtagcggatctgggaccgactacaccctcactatcagctcactg |
| | signal | cagccagaggacttcgctgtctatttctgtcagcaagggaacaccctgccctacacctttggacagggcaccaa |
| | peptide | gctcgagattaaaggtggaggtggcagcggaggaggtgggtccggcggtggaggaagccaggtccaactc |
| | underlined; | caagaaagcggaccgggtcttgtgaagccatcagaaactctttcactgacttgtactgtgagcggagtgtctctc |
| | no stop | cccgattacggggtgtcttggatcagacagccaccggggaagggtctggaatggattggagtgatttggggct |
| | codon | ctgagactacttactaccaatcatccctcaagtcacgcgtcaccatctcaaaggacaactctaagaatcaggtgt |
| | | cactgaaactgtcatctgtgaccgcagccgacaccgccgtgtactattgcgctaagcattactattatggcggga |
| | | gctacgcaatggattactggggacagggtactctggtcaccgtgtccagcaccactaccccagcaccgaggc |
| | | cacccaccccggctcctaccatcgcctcccagcctctgtccctgcgtccggaggcatgtagacccgcagctg |
| | | gtggggccgtgcatacccggggtcttgacttcgcctgcgatatctacatttgggcccctctggctggtacttgcg |
| | | gggtcctgctgctttcactcgtgatcactctttactgtaagcgcggtcggaagaagctgctgtacatctttaagca |
| | | acccttcatgaggcctgtgcagactactcaagaggaggacggctgttcatgccggttcccagaggaggagga |
| | | aggcggctgcgaactgcgcgtgaaattcagccgcagcgcagatgctccagcctaccagcaggggcagaac |
| | | cagctctacaacgaactcaatcttggtcggagagaggagtacgacgtgctggacaagcggagaggacggga |
| | | cccagaaatggggggaagccgcgcagaaagaatccccaagagggcctgtacaacgagctccaaaaggat |
| | | aagatggcagaagcctatagcgagattggtatgaaaggggaacgcagaagaggcaaaggccacgacggac |
| | | tgtaccagggactcagcaccgccaccaaggacacctatgacgctcttcacatgcaggccctgccgcctcgg |
| 356 | CAR 2A | gaaattgtgatgacccagtcacccgccactcttagcctttcacccggtgagcgcgcaaccctgtcttgcagagc |
| | nucleic | ctcccaagacatctcaaaataccttaattggtatcaacagaagcccggacaggctcctcgccttctgatctacca |
| | acid | caccagccggctccattctggaatccctgccaggttcagcggtagcggatctgggaccgactacaccctcact |
| | sequence; | atcagctcactgcagccagaggacttcgctgtctatttctgtcagcaagggaacaccctgccctacacctttgga |
| | no signal | cagggcaccaagctcgagattaaaggtggaggtggcagcggaggaggtgggtccggcggtggaggaagc |
| | peptide; | caggtccaactccaagaaagcggaccgggtcttgtgaagccatcagaaactctttcactgacttgtactgtgag |
| | stop codon | cggagtgtctctccccgattacggggtgtcttggatcagacagccaccggggaagggtctggaatggattgga |
| | underlined | gtgatttggggctctgagactacttactaccaatcatccctcaagtcacgcgtcaccatctcaaaggacaactcta |
| | | agaatcaggtgtcactgaaactgtcatctgtgaccgcagccgacaccgccgtgtactattgcgctaagcattact |
| | | attatggcgggagctacgcaatggattactggggacagggtactctggtcaccgtgtccagcaccactacccc |
| | | agcaccgaggccacccaccccggctcctaccatcgcctcccagcctctgtccctgcgtccggaggcatgtag |
| | | acccgcagctggtggggccgtgcatacccggggtcttgacttcgcctgcgatatctacatttgggcccctctgg |
| | | ctggtacttgcggggtcctgctgctttcactcgtgatcactctttactgtaagcgcggtcggaagaagctgctgta |
| | | catctttaagcaacccttcatgaggcctgtgcagactactcaagaggaggacggctgttcatgccggttcccag |
| | | aggaggaggaaggcggctgcgaactgcgcgtgaaattcagccgcagcgcagatgctccagcctaccagca |
| | | ggggcagaaccagctctacaacgaactcaatcttggtcggagagaggagtacgacgtgctggacaagcgga |
| | | gaggacgggacccagaaatgggcgggaagccgcgcagaaagaatccccaagagggcctgtacaacgag |
| | | ctccaaaaggataagatggcagaagcctatagcgagattggtatgaaaggggaacgcagaagaggcaaag |
| | | gccacgacggactgtaccagggactcagcaccgccaccaaggacacctatgacgctcttcacatgcaggcc |
| | | ctgccgcctcggtaa |
| 417 | CAR 2A | gaaattgtgatgacccagtcacccgccactcttagcctttcacccggtgagcgcgcaaccct |
| | nucleic | gtcttgcagagcctcccaagacatctcaaaataccttaattggtatcaacagaagcccggac |
| | acid | aggctcctcgccttctgatctaccacaccagccggctccattctggaatccctgccaggttc |
| | sequence; | agcggtagcggatctgggaccgactacaccctcactatcagctcactgcagccagaggac |
| | no signal | ttcgctgtctatttctgtcagcaagggaacaccctgccctacacctttggacagggcaccaa |
| | peptide; no | gctcgagattaaaggtggaggtggcagcggaggaggtgggtccggcggtggaggaagc |
| | stop codon | caggtccaactccaagaaagcggaccgggtcttgtgaagccatcagaaactctttcactga |
| | | cttgtactgtgagcggagtgtctctccccgattacggggtgtcttggatcagacagccaccg |
| | | gggaagggtctggaatggattggagtgatttggggctctgagactacttactaccaatcatc |
| | | cctcaagtcacgcgtcaccatctcaaaggacaactctaagaatcaggtgtcactgaaactgt |
| | | catctgtgaccgcagccgacaccgccgtgtactattgcgctaagcattactattatggcggg |
| | | agctacgcaatggattactggggacagggtactctggtcaccgtgtccagcaccactaccc |
| | | cagcaccgaggccacccaccccggctcctaccatcgcctcccagcctctgtccctgcgtc |
| | | cggaggcatgtagacccgcagctggtggggccgtgcatacccggggtcttgacttcgcct |
| | | gcgatatctacatttgggcccctctggctggtacttgcggggtcctgctgctttcactcgtgat |
| | | cactctttactgtaagcgcggtcggaagaagctgctgtacatctttaagcaacccttcatgag |
| | | gcctgtgcagactactcaagaggaggacggctgttcatgccggttcccagaggaggagg |
| | | aaggcggctgcgaactgcgcgtgaaattcagccgcagcgcagatgctccagcctaccag |
| | | caggggcagaaccagctctacaacgaactcaatcttggtcggagagaggagtacgacgt |
| | | gctggacaagcggagaggacgggacccagaaatgggcgggaagccgcgcagaaaga |
| | | atccccaagagggcctgtacaacgagctccaaaaggataagatggcagaagcctatagc |
| | | gagattggtatgaaaggggaacgcagaagaggcaaaggccacgacggactgtaccagg |
| | | gactcagcaccgccaccaaggacacctatgacgctcttcacatgcaggccctgccgcctc |
| | | gg |
| 250 | Anti-CD19 | QVQLQESGPGLVKPSETLSLTCTVSGVSLPDYGVSWIRQPPGKGLEWI |
| | VH | GVIWGSETTYYQSSLKSRVTISKDNSKNQVSLKLSSVTAADTAVYYC |
| | | AKHYYYGGSYAMDYWGQGTLVTVSS |
| 251 | Anti-CD19 | EIVMTQSPATLSLSPGERATLSCRASQDISKYLNWYQQKPGQAPRLLI |
| | VL | YHTSRLHSGIPARFSGSGSGTDYTLTISSLQPEDFAVYFCQQGNTLPYT |
| | | FGQGTKLEIK |
| 331 | VH | QVQLQESGPGLVKPSETLSLTCTVSGVSLPDYGVSWIRQPPGKCLEWI |
| | | GVIWGSETTYYQSSLKSRVTISKDNSKNQVSLKLSSVTAADTAVYYC |
| | | AKHYYYGGSYAMDYWGQGTLVTVSS |
| 332 | VL | EIVMTQSPATLSLSPGERATLSCRASQDISKYLNWYQQKPGQAPRLLI |
| | | YHTSRLHSGIPARFSGSGSGTDYTLTISSLQPEDFAVYFCQQGNTLPYT |
| | | FGCGTKLEIK |

[0367] BCMA

[0368] A non-limiting exemplary tumor antigen is BCMA. CARs that bind to BCMA are known in the art. For example, those disclosed WO2016/014565 or WO2019/241426. Any known BCMA CAR, for example, the BCMA antigen binding domain of any known BCMA CAR, in the art can be used in accordance with the present disclosure. For example, BCMA-1, BCMA-2, BCMA-3, BCMA-4, BCMA-5, BCMA-6, BCMA-7, BCMA-8, BCMA-9, BCMA-10, BCMA-11, BCMA-12, BCMA-13, BCMA-14, BCMA-15, 149362, 149363, 149364, 149365, 149366, 149367, 149368, 149369, BCMA_EBB-C1978-A4, BCMA_EBB-C1978-G1, BCMA_EBB-C1979-C1, BCMA_EBB-C1978-C7, BCMA_EBB-C1978-D10, BCMA_EBB-C1979-C12, BCMA_EBB-C1980-G4, BCMA_EBB-C1980-D2, BCMA_EBB-C1978-A10, BCMA_EBB-C1978-D4, BCMA_EBB-C1980-A2, BCMA_EBB-C1981-C3, BCMA_EBB-C1978-G4, A71D12.2, C11D5.3, C12A3.2, or C13F12.1, disclosed in WO2016/014565.

[0369] In some embodiments, the BCMA CAR comprises one or more CDRs, VH, VL, scFv, or full-length sequences of BCMA-1, BCMA-2, BCMA-3, BCMA-4, BCMA-5, BCMA-6, BCMA-7, BCMA-8, BCMA-9, BCMA-10, BCMA-11, BCMA-12, BCMA-13, BCMA-14, BCMA-15, 149362, 149363, 149364, 149365, 149366, 149367, 149368, 149369, BCMA_EBB-C1978-A4, BCMA_EBB-C1978-G1, BCMA_EBB-C1979-C1, BCMA_EBB-C1978-C7, BCMA_EBB-C1978-D10, BCMA_EBB-C1979-C12, BCMA_EBB-C1980-G4, BCMA_EBB-C1980-D2, BCMA_EBB-C1978-A10, BCMA_EBB-C1978-D4, BCMA_EBB-C1980-A2, BCMA_EBB-C1981-C3, BCMA_EBB-C1978-G4, A71D12.2, C11D5.3, C12A3.2, or C13F12.1 disclosed in WO2016/014565, or a sequence substantially (for example, 95-99%) identical thereto.

[0370] In some embodiments, a BCMA CAR comprises a sequence, for example, a CDR, VH, VL, scFv, or full-CAR sequence, disclosed in Tables 2-14, or a sequence having at least 80%, 85%, 90%, 95%, or 99% identity thereto.

TABLE 2
Amino acid and nucleic acid sequences of exemplary PALLAS-derived anti-
BCMA molecules

| SEQ | Name/ | |
|---|---|---|
| ID NO | Description | Sequence |
| R1B6 | | |
| SEQ ID | HCDR1 | SYAMS |
| NO: 44 | (Kabat) | |
| SEQ ID | HCDR2 | AISGSGGSTYYADSVKG |
| NO: 45 | (Kabat) | |
| SEQ ID | HCDR3 | REWVPYDVSWYFDY |
| NO: 46 | (Kabat) | |
| SEQ ID | HCDR1 | GFTFSSY |
| NO: 47 | (Chothia) | |
| SEQ ID | HCDR2 | SGSGGS |
| NO: 48 | (Chothia) | |
| SEQ ID | HCDR3 | REWVPYDVSWYFDY |
| NO: 46 | (Chothia) | |
| SEQ ID | HCDR1 | GFTFSSYA |
| NO: 49 | (IMGT) | |
| SEQ ID | HCDR2 | ISGSGGST |
| NO: 50 | (IMGT) | |
| SEQ ID | HCDR3 | ARREWVPYDVSWYFDY |
| NO: 51 | (IMGT) | |
| SEQ ID | VH | EVQLLESGGGLVQPGGSLRLSCAASGFTFSSYAMSWVRQAP |
| NO: 52 | | GKGLEWVSAISGSGGSTYYADSVKGRFTISRDNSKNTLYLQ |
| | | MNSLRAEDTAVYYCARREWVPYDVSWYFDYWGQGTLVT |
| | | VSS |
| SEQ ID | DNA VH | GAAGTGCAGTTGCTGGAGTCAGGCGGAGGACTGGTGCAG |
| NO: 53 | | CCCGGAGGATCGCTTCGCTTGAGCTGCGCAGCCTCAGGCT |
| | | TTACCTTCTCCTCCTACGCCATGTCCTGGGTCAGACAGGC |
| | | TCCCGGGAAGGGACTGGAATGGGTGTCCGCCATTAGCGG |
| | | TTCCGGCGGAAGCACTTACTATGCCGACTCTGTGAAGGG |
| | | CCGCTTCACTATCTCCCGGGACAACTCCAAGAACACCCTG |
| | | TATCTCCAAATGAATTCCCTGAGGGCCGAAGATACCGCG |
| | | GTGTACTACTGCGCTAGACGGGAGTGGGTGCCCTACGAT |
| | | GTCAGCTGGTACTTCGACTACTGGGGACAGGGCACTCTC |
| | | GTGACTGTGTCCTCC |
| SEQ ID | LCDR1 | RASQSISSYLN |
| NO: 54 | (Kabat) | |
| SEQ ID | LCDR2 | AASSLQS |
| NO: 55 | (Kabat) | |
| SEQ ID | LCDR3 | QQSYSTPLT |
| NO: 56 | (Kabat) | |
| SEQ ID | LCDR1 | SQSISSY |
| NO: 57 | (Chothia) | |
| SEQ ID | LCDR2 | AAS |
| NO: 58 | (Chothia) | |
| SEQ ID | LCDR3 | SYSTPL |
| NO: 59 | (Chothia) | |
| SEQ ID | LCDR1 | QSISSY |
| NO: 60 | (IMGT) | |
| SEQ ID | LCDR2 | AAS |
| NO: 58 | (IMGT) | |
| SEQ ID | LCDR3 | QQSYSTPLT |
| NO: 56 | (IMGT) | |
| SEQ ID | VL | DIQMTQSPSSLSASVGDRVTITCRASQSISSYLNWYQQKPGK |
| NO: 61 | | APKLLIYAASSLQSGVPSRFSGSGSGTDFTLTISSLQPEDFAT |
| | | YYCQQSYSTPLTFGQGTKVEIK |
| SEQ ID | DNA VL | GACATTCAAATGACTCAGTCCCCGTCCTCCCTCTCCGCCT |
| NO: 62 | | CCGTGGGAGATCGCGTCACGATCACGTGCAGGGCCAGCC |
| | | AGAGCATCTCCAGCTACCTGAACTGGTACCAGCAGAAGC |
| | | CAGGGAAGGCACCGAAGCTCCTGATCTACGCCGCTAGCT |
| | | CGCTGCAGTCCGGCGTCCCTTCACGGTTCTCGGGATCGGG |
| | | CTCAGGCACCGACTTCACCCTGACCATTAGCAGCCTGCAG |
| | | CCGGAGGACTTCGCGACATACTACTGTCAGCAGTCATACT |
| | | CCACCCCTCTGACCTTCGGCCAAGGGACCAAAGTGGAGA |
| | | TCAAG |
| SEQ ID | Linker | GGGGSGGGGSGGGGSGGGGS |
| NO: 63 | | |
| SEQ ID | scFv (VH- | EVQLLESGGGLVQPGGSLRLSCAASGFTFSSYAMSWVRQAP |
| NO: 64 | linker-VL) | GKGLEWVSAISGSGGSTYYADSVKGRFTISRDNSKNTLYLQ |
| | | MNSLRAEDTAVYYCARREWVPYDVSWYFDYWGQGTLVT |
| | | VSSGGGGSGGGGSGGGGSGGGGSDIQMTQSPSSLSASVGDR |
| | | VTITCRASQSISSYLNWYQQKPGKAPKLLIYAASSLQSGVPS |
| | | RFSGSGSGTDFTLTISSLQPEDFATYYCQQSYSTPLTFGQGTK |
| | | VEIK |
| SEQ ID | DNA scFv | GAAGTGCAGTTGCTGGAGTCAGGCGGAGGACTGGTGCAG |
| NO: 65 | | CCCGGAGGATCGCTTCGCTTGAGCTGCGCAGCCTCAGGCT |
| | | TTACCTTCTCCTCCTACGCCATGTCCTGGGTCAGACAGGC |
| | | TCCCGGGAAGGGACTGGAATGGGTGTCCGCCATTAGCGG |
| | | TTCCGGCGGAAGCACTTACTATGCCGACTCTGTGAAGGG |
| | | CCGCTTCACTATCTCCCGGGACAACTCCAAGAACACCCTG |
| | | TATCTCCAAATGAATTCCCTGAGGGCCGAAGATACCGCG |
| | | GTGTACTACTGCGCTAGACGGGAGTGGGTGCCCTACGAT |
| | | GTCAGCTGGTACTTCGACTACTGGGGACAGGGCACTCTC |
| | | GTGACTGTGTCCTCCGGTGGTGGTGGATCGGGGGGTGGT |
| | | GGTTCGGGCGGAGGAGGATCTGGAGGAGGAGGGTCGGA |
| | | CATTCAAATGACTCAGTCCCCGTCCTCCCTCTCCGCCTCC |
| | | GTGGGAGATCGCGTCACGATCACGTGCAGGGCCAGCCAG |
| | | AGCATCTCCAGCTACCTGAACTGGTACCAGCAGAAGCCA |
| | | GGGAAGGCACCGAAGCTCCTGATCTACGCCGCTAGCTCG |
| | | CTGCAGTCCGGCGTCCCTTCACGGTTCTCGGGATCGGGCT |
| | | CAGGCACCGACTTCACCCTGACCATTAGCAGCCTGCAGC |
| | | CGGAGGACTTCGCGACATACTACTGTCAGCAGTCATACTC |
| | | CACCCCTCTGACCTTCGGCCAAGGGACCAAAGTGGAGAT |
| | | CAAG |
| SEQ ID | Full CAR | EVQLLESGGGLVQPGGSLRLSCAASGFTFSSYAMSWVRQAP |
| NO: 66 | amino acid | GKGLEWVSAISGSGGSTYYADSVKGRFTISRDNSKNTLYLQ |
| | sequence | MNSLRAEDTAVYYCARREWVPYDVSWYFDYWGQGTLVT |
| | | VSSGGGGSGGGGSGGGGSGGGGSDIQMTQSPSSLSASVGDR |
| | | VTITCRASQSISSYLNWYQQKPGKAPKLLIYAASSLQSGVPS |
| | | RFSGSGSGTDFTLTISSLQPEDFATYYCQQSYSTPLTFGQGTK |
| | | VEIKTTTPAPRPPTPAPTIASQPLSLRPEACRPAAGGAVHTRG |
| | | LDFACDIYIWAPLAGTCGVLLLSLVITLYCKRGRKKLLYIFK |
| | | QPFMRPVQTTQEEDGCSCRFPEEEEGGCELRVKFSRSADAP |
| | | AYQQGQNQLYNELNLGRREEYDVLDKRRGRDPEMGGKPR |
| | | RKNPQEGLYNELQKDKMAEAYSEIGMKGERRRGKGHDGL |
| | | YQGLSTATKDTYDALHMQALPPR |
| SEQ ID | Full CAR | GAAGTGCAGTTGCTGGAGTCAGGCGGAGGACTGGTGCAG |
| NO: 67 | DNA | CCCGGAGGATCGCTTCGCTTGAGCTGCGCAGCCTCAGGCT |
| | sequence | TTACCTTCTCCTCCTACGCCATGTCCTGGGTCAGACAGGC |
| | | TCCCGGGAAGGGACTGGAATGGGTGTCCGCCATTAGCGG |
| | | TTCCGGCGGAAGCACTTACTATGCCGACTCTGTGAAGGG |
| | | CCGCTTCACTATCTCCCGGGACAACTCCAAGAACACCCTG |
| | | TATCTCCAAATGAATTCCCTGAGGGCCGAAGATACCGCG |
| | | GTGTACTACTGCGCTAGACGGGAGTGGGTGCCCTACGAT |
| | | GTCAGCTGGTACTTCGACTACTGGGGACAGGGCACTCTC |
| | | GTGACTGTGTCCTCCGGTGGTGGTGGATCGGGGGGTGGT |
| | | GGTTCGGGCGGAGGAGGATCTGGAGGAGGAGGGTCGGA |
| | | CATTCAAATGACTCAGTCCCCGTCCTCCCTCTCCGCCTCC |
| | | GTGGGAGATCGCGTCACGATCACGTGCAGGGCCAGCCAG |
| | | AGCATCTCCAGCTACCTGAACTGGTACCAGCAGAAGCCA |
| | | GGGAAGGCACCGAAGCTCCTGATCTACGCCGCTAGCTCG |
| | | CTGCAGTCCGGCGTCCCTTCACGGTTCTCGGGATCGGGCT |
| | | CAGGCACCGACTTCACCCTGACCATTAGCAGCCTGCAGC |
| | | CGGAGGACTTCGCGACATACTACTGTCAGCAGTCATACTC |
| | | CACCCCTCTGACCTTCGGCCAAGGGACCAAAGTGGAGAT |
| | | CAAGACCACTACCCCAGCACCGAGGCCACCCACCCCGGC |
| | | TCCTACCATCGCCTCCCAGCCTCTGTCCCTGCGTCCGGAG |
| | | GCATGTAGACCCGCAGCTGGTGGGGCCGTGCATACCCGG |
| | | GGTCTTGACTTCGCCTGCGATATCTACATTTGGGCCCCTC |
| | | TGGCTGGTACTTGCGGGGTCCTGCTGCTTTCACTCGTGAT |
| | | CACTCTTTACTGTAAGCGCGGTCGGAAGAAGCTGCTGTAC |
| | | ATCTTTAAGCAACCCTTCATGAGGCCTGTGCAGACTACTC |
| | | AAGAGGAGGACGGCTGTTCATGCCGGTTCCCAGAGGAGG |
| | | AGGAAGGCGGCTGCGAACTGCGCGTGAAATTCAGCCGCA |
| | | GCGCAGATGCTCCAGCCTACCAGCAGGGGCAGAACCAGC |
| | | TCTACAACGAACTCAATCTTGGTCGGAGAGAGGAGTACG |
| | | ACGTGCTGGACAAGCGGAGAGGACGGGACCCAGAAATG |
| | | GGCGGGAAGCCGCGCAGAAAGAATCCCCAAGAGGGCCT |
| | | GTACAACGAGCTCCAAAAGGATAAGATGGCAGAAGCCTA |
| | | TAGCGAGATTGGTATGAAAGGGGAACGCAGAAGAGGCA |
| | | AAGGCCACGACGGACTGTACCAGGGACTCAGCACCGCCA |
| | | CCAAGGACACCTATGACGCTCTTCACATGCAGGCCCTGCC |
| | | GCCTCGG |
| R1F2 | | |
| SEQ ID | HCDR1 | SYAMS |
| NO: 44 | (Kabat) | |
| SEQ ID | HCDR2 | AISGSGGSTYYADSVKG |
| NO: 45 | (Kabat) | |
| SEQ ID | HCDR3 | REWWYDDWYLDY |
| NO: 68 | (Kabat) | |
| SEQ ID | HCDR1 | GFTFSSY |
| NO: 47 | (Chothia) | |
| SEQ ID | HCDR2 | SGSGGS |
| NO: 48 | (Chothia) | |
| SEQ ID | HCDR3 | REWWYDDWYLDY |
| NO: 68 | (Chothia) | |
| SEQ ID | HCDR1 | GFTFSSYA |
| NO: 49 | (IMGT) | |
| SEQ ID | HCDR2 | ISGSGGST |
| NO: 50 | (IMGT) | |
| SEQ ID | HCDR3 | ARREWWYDDWYLDY |
| NO: 69 | (IMGT) | |
| SEQ ID | VH | EVQLLESGGGLVQPGGSLRLSCAASGFTFSSYAMSWVRQAP |
| NO: 70 | | GKGLEWVSAISGSGGSTYYADSVKGRFTISRDNSKNTLYLQ |
| | | MNSLRAEDTAVYYCARREWWYDDWYLDYWGQGTLVTVS |
| | | S |
| SEQ ID | DNA VH | GAAGTGCAGTTGCTGGAGTCAGGCGGAGGACTGGTGCAG |
| NO: 71 | | CCCGGAGGATCGCTTCGCTTGAGCTGCGCAGCCTCAGGCT |
| | | TTACCTTCTCCTCCTACGCCATGTCCTGGGTCAGACAGGC |
| | | TCCCGGGAAGGGACTGGAATGGGTGTCCGCCATTAGCGG |
| | | TTCCGGCGGAAGCACTTACTATGCCGACTCTGTGAAGGG |
| | | CCGCTTCACTATCTCCCGGGACAACTCCAAGAACACCCTG |
| | | TATCTCCAAATGAATTCCCTGAGGGCCGAAGATACCGCG |
| | | GTGTACTACTGCGCTAGACGGGAGTGGTGGTACGACGAT |
| | | TGGTACCTGGACTACTGGGGACAGGGCACTCTCGTGACT |
| | | GTGTCCTCC |
| SEQ ID | LCDR1 | RASQSISSYLN |
| NO: 54 | (Kabat) | |
| SEQ ID | LCDR2 | AASSLQS |
| NO: 55 | (Kabat) | |
| SEQ ID | LCDR3 | QQSYSTPLT |
| NO: 56 | (Kabat) | |
| SEQ ID | LCDR1 | SQSISSY |
| NO: 57 | (Chothia) | |
| SEQ ID | LCDR2 | AAS |
| NO: 58 | (Chothia) | |
| SEQ ID | LCDR3 | SYSTPL |
| NO: 59 | (Chothia) | |
| SEQ ID | LCDR1 | QSISSY |
| NO: 60 | (IMGT) | |
| SEQ ID | LCDR2 | AAS |
| NO: 58 | (IMGT) | |
| SEQ ID | LCDR3 | QQSYSTPLT |
| NO: 56 | (IMGT) | |
| SEQ ID | VL | DIQMTQSPSSLSASVGDRVTITCRASQSISSYLNWYQQKPGK |
| NO: 61 | | APKLLIYAASSLQSGVPSRFSGSGSGTDFTLTISSLQPEDFAT |
| | | YYCQQSYSTPLTFGQGTKVEIK |
| SEQ ID | DNA VL | GACATTCAAATGACTCAGTCCCCGTCCTCCCTCTCCGCCT |
| NO: 62 | | CCGTGGGAGATCGCGTCACGATCACGTGCAGGGCCAGCC |
| | | AGAGCATCTCCAGCTACCTGAACTGGTACCAGCAGAAGC |
| | | CAGGGAAGGCACCGAAGCTCCTGATCTACGCCGCTAGCT |
| | | CGCTGCAGTCCGGCGTCCCTTCACGGTTCTCGGGATCGGG |
| | | CTCAGGCACCGACTTCACCCTGACCATTAGCAGCCTGCAG |
| | | CCGGAGGACTTCGCGACATACTACTGTCAGCAGTCATACT |
| | | CCACCCCTCTGACCTTCGGCCAAGGGACCAAAGTGGAGA |
| | | TCAAG |
| SEQ ID | Linker | GGGGSGGGGSGGGGSGGGGS |
| NO: 63 | | |
| SEQ ID | scFv (VH- | EVQLLESGGGLVQPGGSLRLSCAASGFTFSSYAMSWVRQAP |
| NO: 72 | linker-VL) | GKGLEWVSAISGSGGSTYYADSVKGRFTISRDNSKNTLYLQ |
| | | MNSLRAEDTAVYYCARREWWYDDWYLDYWGQGTLVTVS |
| | | SGGGGSGGGGSGGGGSGGGGSDIQMTQSPSSLSASVGDRVT |
| | | ITCRASQSISSYLNWYQQKPGKAPKLLIYAASSLQSGVPSRF |
| | | SGSGSGTDFTLTISSLQPEDFATYYCQQSYSTPLTFGQGTKV |
| | | EIK |
| SEQ ID | DNA scFv | GAAGTGCAGTTGCTGGAGTCAGGCGGAGGACTGGTGCAG |
| NO: 73 | | CCCGGAGGATCGCTTCGCTTGAGCTGCGCAGCCTCAGGCT |
| | | TTACCTTCTCCTCCTACGCCATGTCCTGGGTCAGACAGGC |
| | | TCCCGGGAAGGGACTGGAATGGGTGTCCGCCATTAGCGG |
| | | TTCCGGCGGAAGCACTTACTATGCCGACTCTGTGAAGGG |
| | | CCGCTTCACTATCTCCCGGGACAACTCCAAGAACACCCTG |
| | | TATCTCCAAATGAATTCCCTGAGGGCCGAAGATACCGCG |
| | | GTGTACTACTGCGCTAGACGGGAGTGGTGGTACGACGAT |
| | | TGGTACCTGGACTACTGGGGACAGGGCACTCTCGTGACT |
| | | GTGTCCTCCGGTGGTGGTGGATCGGGGGGTGGTGGTTCG |
| | | GGCGGAGGAGGATCTGGAGGAGGAGGGTCGGACATTCA |
| | | AATGACTCAGTCCCCGTCCTCCCTCTCCGCCTCCGTGGGA |
| | | GATCGCGTCACGATCACGTGCAGGGCCAGCCAGAGCATC |
| | | TCCAGCTACCTGAACTGGTACCAGCAGAAGCCAGGGAAG |
| | | GCACCGAAGCTCCTGATCTACGCCGCTAGCTCGCTGCAGT |
| | | CCGGCGTCCCTTCACGGTTCTCGGGATCGGGCTCAGGCAC |
| | | CGACTTCACCCTGACCATTAGCAGCCTGCAGCCGGAGGA |
| | | CTTCGCGACATACTACTGTCAGCAGTCATACTCCACCCCT |
| | | CTGACCTTCGGCCAAGGGACCAAAGTGGAGATCAAG |
| SEQ ID | Full CAR | EVQLLESGGGLVQPGGSLRLSCAASGFTFSSYAMSWVRQAP |
| NO: 74 | amino acid | GKGLEWVSAISGSGGSTYYADSVKGRFTISRDNSKNTLYLQ |
| | sequence | MNSLRAEDTAVYYCARREWWYDDWYLDYWGQGTLVTVS |
| | | SGGGGSGGGGSGGGGSGGGGSDIQMTQSPSSLSASVGDRVT |
| | | ITCRASQSISSYLNWYQQKPGKAPKLLIYAASSLQSGVPSRF |
| | | SGSGSGTDFTLTISSLQPEDFATYYCQQSYSTPLTFGQGTKV |
| | | EIKTTTPAPRPPTPAPTIASQPLSLRPEACRPAAGGAVHTRGL |
| | | DFACDIYIWAPLAGTCGVLLLSLVITLYCKRGRKKLLYIFKQ |
| | | PFMRPVQTTQEEDGCSCRFPEEEEGGCELRVKFSRSADAPA |
| | | YQQGQNQLYNELNLGRREEYDVLDKRRGRDPEMGGKPRR |
| | | KNPQEGLYNELQKDKMAEAYSEIGMKGERRRGKGHDGLY |
| | | QGLSTATKDTYDALHMQALPPR |
| SEQ ID | Full CAR | GAAGTGCAGTTGCTGGAGTCAGGCGGAGGACTGGTGCAG |
| NO: 75 | DNA | CCCGGAGGATCGCTTCGCTTGAGCTGCGCAGCCTCAGGCT |
| | sequence | TTACCTTCTCCTCCTACGCCATGTCCTGGGTCAGACAGGC |
| | | TCCCGGGAAGGGACTGGAATGGGTGTCCGCCATTAGCGG |
| | | TTCCGGCGGAAGCACTTACTATGCCGACTCTGTGAAGGG |
| | | CCGCTTCACTATCTCCCGGGACAACTCCAAGAACACCCTG |
| | | TATCTCCAAATGAATTCCCTGAGGGCCGAAGATACCGCG |
| | | GTGTACTACTGCGCTAGACGGGAGTGGTGGTACGACGAT |
| | | TGGTACCTGGACTACTGGGGACAGGGCACTCTCGTGACT |
| | | GTGTCCTCCGGTGGTGGTGGATCGGGGGGTGGTGGTTCG |
| | | GGCGGAGGAGGATCTGGAGGAGGAGGGTCGGACATTCA |
| | | AATGACTCAGTCCCCGTCCTCCCTCTCCGCCTCCGTGGGA |
| | | GATCGCGTCACGATCACGTGCAGGGCCAGCCAGAGCATC |
| | | TCCAGCTACCTGAACTGGTACCAGCAGAAGCCAGGGAAG |
| | | GCACCGAAGCTCCTGATCTACGCCGCTAGCTCGCTGCAGT |
| | | CCGGCGTCCCTTCACGGTTCTCGGGATCGGGCTCAGGCAC |
| | | CGACTTCACCCTGACCATTAGCAGCCTGCAGCCGGAGGA |
| | | CTTCGCGACATACTACTGTCAGCAGTCATACTCCACCCCT |
| | | CTGACCTTCGGCCAAGGGACCAAAGTGGAGATCAAGACC |
| | | ACTACCCCAGCACCGAGGCCACCCACCCCGGCTCCTACC |
| | | ATCGCCTCCCAGCCTCTGTCCCTGCGTCCGGAGGCATGTA |
| | | GACCCGCAGCTGGTGGGGCCGTGCATACCCGGGGTCTTG |
| | | ACTTCGCCTGCGATATCTACATTTGGGCCCCTCTGGCTGG |
| | | TACTTGCGGGGTCCTGCTGCTTTCACTCGTGATCACTCTTT |
| | | ACTGTAAGCGCGGTCGGAAGAAGCTGCTGTACATCTTTA |
| | | AGCAACCCTTCATGAGGCCTGTGCAGACTACTCAAGAGG |
| | | AGGACGGCTGTTCATGCCGGTTCCCAGAGGAGGAGGAAG |
| | | GCGGCTGCGAACTGCGCGTGAAATTCAGCCGCAGCGCAG |
| | | ATGCTCCAGCCTACCAGCAGGGGCAGAACCAGCTCTACA |
| | | ACGAACTCAATCTTGGTCGGAGAGAGGAGTACGACGTGC |
| | | TGGACAAGCGGAGAGGACGGGACCCAGAAATGGGCGGG |
| | | AAGCCGCGCAGAAAGAATCCCCAAGAGGGCCTGTACAAC |
| | | GAGCTCCAAAAGGATAAGATGGCAGAAGCCTATAGCGAG |
| | | ATTGGTATGAAAGGGGAACGCAGAAGAGGCAAAGGCCA |
| | | CGACGGACTGTACCAGGGACTCAGCACCGCCACCAAGGA |
| | | CACCTATGACGCTCTTCACATGCAGGCCCTGCCGCCTCGG |
| R1G5 | | |
| SEQ ID | HCDR1 | SYAMS |
| NO: 44 | (Kabat) | |
| SEQ ID | HCDR2 | AISGSGGSTYYADSVKG |
| NO: 45 | (Kabat) | |
| SEQ ID | HCDR3 | REWWGESWLFDY |
| NO: 76 | (Kabat) | |
| SEQ ID | HCDR1 | GFTFSSY |
| NO: 47 | (Chothia) | |
| SEQ ID | HCDR2 | SGSGGS |
| NO: 48 | (Chothia) | |
| SEQ ID | HCDR3 | REWWGESWLFDY |
| NO: 76 | (Chothia) | |
| SEQ ID | HCDR1 | GFTFSSYA |
| NO: 49 | (IMGT) | |
| SEQ ID | HCDR2 | ISGSGGST |
| NO: 50 | (IMGT) | |
| SEQ ID | HCDR3 | ARREWWGESWLFDY |
| NO: 77 | (IMGT) | |
| SEQ ID | VH | EVQLLESGGGLVQPGGSLRLSCAASGFTFSSYAMSWVRQAP |
| NO: 78 | | GKGLEWVSAISGSGGSTYYADSVKGRFTISRDNSKNTLYLQ |
| | | MNSLRAEDTAVYYCARREWWGESWLFDYWGQGTLVTVSS |
| SEQ ID | DNA VH | GAAGTGCAGTTGCTGGAGTCAGGCGGAGGACTGGTGCAG |
| NO: 79 | | CCCGGAGGATCGCTTCGCTTGAGCTGCGCAGCCTCAGGCT |
| | | TTACCTTCTCCTCCTACGCCATGTCCTGGGTCAGACAGGC |
| | | TCCCGGGAAGGGACTGGAATGGGTGTCCGCCATTAGCGG |
| | | TTCCGGCGGAAGCACTTACTATGCCGACTCTGTGAAGGG |
| | | CCGCTTCACTATCTCCCGGGACAACTCCAAGAACACCCTG |
| | | TATCTCCAAATGAATTCCCTGAGGGCCGAAGATACCGCG |
| | | GTGTACTACTGCGCTAGACGGGAGTGGTGGGGAGAAAGC |
| | | TGGCTGTTCGACTACTGGGGACAGGGCACTCTCGTGACTG |
| | | TGTCCTCC |
| SEQ ID | LCDR1 | RASQSISSYLN |
| NO: 54 | (Kabat) | |
| SEQ ID | LCDR2 | AASSLQS |
| NO: 55 | (Kabat) | |
| SEQ ID | LCDR3 | QQSYSTPLT |
| NO: 56 | (Kabat) | |
| SEQ ID | LCDR1 | SQSISSY |
| NO: 57 | (Chothia) | |
| SEQ ID | LCDR2 | AAS |
| NO: 58 | (Chothia) | |
| SEQ ID | LCDR3 | SYSTPL |
| NO: 59 | (Chothia) | |
| SEQ ID | LCDR1 | QSISSY |
| NO: 60 | (IMGT) | |
| SEQ ID | LCDR2 | AAS |
| NO: 58 | (IMGT) | |
| SEQ ID | LCDR3 | QQSYSTPLT |
| NO: 56 | (IMGT) | |
| SEQ ID | VL | DIQMTQSPSSLSASVGDRVTITCRASQSISSYLNWYQQKPGK |
| NO: 61 | | APKLLIYAASSLQSGVPSRFSGSGSGTDFTLTISSLQPEDFAT |
| | | YYCQQSYSTPLTFGQGTKVEIK |
| SEQ ID | DNA VL | GACATTCAAATGACTCAGTCCCCGTCCTCCCTCTCCGCCT |
| NO: 62 | | CCGTGGGAGATCGCGTCACGATCACGTGCAGGGCCAGCC |
| | | AGAGCATCTCCAGCTACCTGAACTGGTACCAGCAGAAGC |
| | | CAGGGAAGGCACCGAAGCTCCTGATCTACGCCGCTAGCT |
| | | CGCTGCAGTCCGGCGTCCCTTCACGGTTCTCGGGATCGGG |
| | | CTCAGGCACCGACTTCACCCTGACCATTAGCAGCCTGCAG |
| | | CCGGAGGACTTCGCGACATACTACTGTCAGCAGTCATACT |
| | | CCACCCCTCTGACCTTCGGCCAAGGGACCAAAGTGGAGA |
| | | TCAAG |
| SEQ ID | Linker | GGGGSGGGGSGGGGSGGGGS |
| NO: 63 | | |
| SEQ ID | scFv (VH- | EVQLLESGGGLVQPGGSLRLSCAASGFTFSSYAMSWVRQAP |
| NO: 80 | linker-VL) | GKGLEWVSAISGSGGSTYYADSVKGRFTISRDNSKNTLYLQ |
| | | MNSLRAEDTAVYYCARREWWGESWLFDYWGQGTLVTVSS |
| | | GGGGSGGGGSGGGGSGGGGSDIQMTQSPSSLSASVGDRVTI |
| | | TCRASQSISSYLNWYQQKPGKAPKLLIYAASSLQSGVPSRFS |
| | | GSGSGTDFTLTISSLQPEDFATYYCQQSYSTPLTFGQGTKVEI |
| | | K |
| SEQ ID | DNA scFv | GAAGTGCAGTTGCTGGAGTCAGGCGGAGGACTGGTGCAG |
| NO: 81 | | CCCGGAGGATCGCTTCGCTTGAGCTGCGCAGCCTCAGGCT |
| | | TTACCTTCTCCTCCTACGCCATGTCCTGGGTCAGACAGGC |
| | | TCCCGGGAAGGGACTGGAATGGGTGTCCGCCATTAGCGG |
| | | TTCCGGCGGAAGCACTTACTATGCCGACTCTGTGAAGGG |
| | | CCGCTTCACTATCTCCCGGGACAACTCCAAGAACACCCTG |
| | | TATCTCCAAATGAATTCCCTGAGGGCCGAAGATACCGCG |
| | | GTGTACTACTGCGCTAGACGGGAGTGGTGGGGAGAAAGC |
| | | TGGCTGTTCGACTACTGGGGACAGGGCACTCTCGTGACTG |
| | | TGTCCTCCGGTGGTGGTGGATCGGGGGGTGGTGGTTCGG |
| | | GCGGAGGAGGATCTGGAGGAGGAGGGTCGGACATTCAA |
| | | ATGACTCAGTCCCCGTCCTCCCTCTCCGCCTCCGTGGGAG |
| | | ATCGCGTCACGATCACGTGCAGGGCCAGCCAGAGCATCT |
| | | CCAGCTACCTGAACTGGTACCAGCAGAAGCCAGGGAAGG |
| | | CACCGAAGCTCCTGATCTACGCCGCTAGCTCGCTGCAGTC |
| | | CGGCGTCCCTTCACGGTTCTCGGGATCGGGCTCAGGCACC |
| | | GACTTCACCCTGACCATTAGCAGCCTGCAGCCGGAGGAC |
| | | TTCGCGACATACTACTGTCAGCAGTCATACTCCACCCCTC |
| | | TGACCTTCGGCCAAGGGACCAAAGTGGAGATCAAG |
| SEQ ID | Full CAR | EVQLLESGGGLVQPGGSLRLSCAASGFTFSSYAMSWVRQAP |
| NO: 82 | amino acid | GKGLEWVSAISGSGGSTYYADSVKGRFTISRDNSKNTLYLQ |
| | sequence | MNSLRAEDTAVYYCARREWWGESWLFDYWGQGTLVTVSS |
| | | GGGGSGGGGSGGGGSGGGGSDIQMTQSPSSLSASVGDRVTI |
| | | TCRASQSISSYLNWYQQKPGKAPKLLIYAASSLQSGVPSRFS |
| | | GSGSGTDFTLTISSLQPEDFATYYCQQSYSTPLTFGQGTKVEI |
| | | KTTTPAPRPPTPAPTIASQPLSLRPEACRPAAGGAVHTRGLD |
| | | FACDIYIWAPLAGTCGVLLLSLVITLYCKRGRKKLLYIFKQP |
| | | FMRPVQTTQEEDGCSCRFPEEEEGGCELRVKFSRSADAPAY |
| | | QQGQNQLYNELNLGRREEYDVLDKRRGRDPEMGGKPRRK |
| | | NPQEGLYNELQKDKMAEAYSEIGMKGERRRGKGHDGLYQ |
| | | GLSTATKDTYDALHMQALPPR |
| SEQ ID | Full CAR | GAAGTGCAGTTGCTGGAGTCAGGCGGAGGACTGGTGCAG |
| NO: 83 | DNA | CCCGGAGGATCGCTTCGCTTGAGCTGCGCAGCCTCAGGCT |
| | sequence | TTACCTTCTCCTCCTACGCCATGTCCTGGGTCAGACAGGC |
| | | TCCCGGGAAGGGACTGGAATGGGTGTCCGCCATTAGCGG |
| | | TTCCGGCGGAAGCACTTACTATGCCGACTCTGTGAAGGG |
| | | CCGCTTCACTATCTCCCGGGACAACTCCAAGAACACCCTG |
| | | TATCTCCAAATGAATTCCCTGAGGGCCGAAGATACCGCG |
| | | GTGTACTACTGCGCTAGACGGGAGTGGTGGGGAGAAAGC |
| | | TGGCTGTTCGACTACTGGGGACAGGGCACTCTCGTGACTG |
| | | TGTCCTCCGGTGGTGGTGGATCGGGGGGTGGTGGTTCGG |
| | | GCGGAGGAGGATCTGGAGGAGGAGGGTCGGACATTCAA |
| | | ATGACTCAGTCCCCGTCCTCCCTCTCCGCCTCCGTGGGAG |
| | | ATCGCGTCACGATCACGTGCAGGGCCAGCCAGAGCATCT |
| | | CCAGCTACCTGAACTGGTACCAGCAGAAGCCAGGGAAGG |
| | | CACCGAAGCTCCTGATCTACGCCGCTAGCTCGCTGCAGTC |
| | | CGGCGTCCCTTCACGGTTCTCGGGATCGGGCTCAGGCACC |
| | | GACTTCACCCTGACCATTAGCAGCCTGCAGCCGGAGGAC |
| | | TTCGCGACATACTACTGTCAGCAGTCATACTCCACCCCTC |
| | | TGACCTTCGGCCAAGGGACCAAAGTGGAGATCAAGACCA |
| | | CTACCCCAGCACCGAGGCCACCCACCCCGGCTCCTACCA |
| | | TCGCCTCCCAGCCTCTGTCCCTGCGTCCGGAGGCATGTAG |
| | | ACCCGCAGCTGGTGGGGCCGTGCATACCCGGGGTCTTGA |
| | | CTTCGCCTGCGATATCTACATTTGGGCCCCTCTGGCTGGT |
| | | ACTTGCGGGGTCCTGCTGCTTTCACTCGTGATCACTCTTT |
| | | ACTGTAAGCGCGGTCGGAAGAAGCTGCTGTACATCTTTA |
| | | AGCAACCCTTCATGAGGCCTGTGCAGACTACTCAAGAGG |
| | | AGGACGGCTGTTCATGCCGGTTCCCAGAGGAGGAGGAAG |
| | | GCGGCTGCGAACTGCGCGTGAAATTCAGCCGCAGCGCAG |
| | | ATGCTCCAGCCTACCAGCAGGGGCAGAACCAGCTCTACA |
| | | ACGAACTCAATCTTGGTCGGAGAGAGGAGTACGACGTGC |
| | | TGGACAAGCGGAGAGGACGGGACCCAGAAATGGGCGGG |
| | | AAGCCGCGCAGAAAGAATCCCCAAGAGGGCCTGTACAAC |
| | | GAGCTCCAAAAGGATAAGATGGCAGAAGCCTATAGCGAG |
| | | ATTGGTATGAAAGGGGAACGCAGAAGAGGCAAAGGCCA |
| | | CGACGGACTGTACCAGGGACTCAGCACCGCCACCAAGGA |
| | | CACCTATGACGCTCTTCACATGCAGGCCCTGCCGCCTCGG |

TABLE 3
Kabat CDRs of exemplary PALLAS-derived anti-BCMA molecules

| Kabat | HCDR1 | HCDR2 | HCDR3 | LCDR1 | LCDR2 | LCDR3 |
|---|---|---|---|---|---|---|
| R1B6 | SYAMS | AISGSGGSTY | REWVPYDV | RASQSISS | AASSL | QQSYST |
| | (SEQ ID | YADSVKG | SWYFDY | YLN (SEQ | QS | PLT |
| | NO: 44) | (SEQ ID NO: | (SEQ ID NO: | ID NO: 54) | (SEQ | (SEQ ID |
| | | 45) | 46) | | ID NO: | NO: 56) |
| | | | | | 55 | |
| R1F2 | SYAMS | AISGSGGSTY | REWWYDD | RASQSISS | AASSL | QQSYST |
| | (SEQ ID | YADSVKG | WYLDY | YLN (SEQ | QS | PLT |
| | NO: 44) | (SEQ ID NO: | (SEQ ID NO: | ID NO: 54) | (SEQ | (SEQ ID |
| | | 45) | 68) | | ID NO: | NO: 56) |
| | | | | | 55) | |
| R1G5 | SYAMS | AISGSGGSTY | REWWGES | RASQSISS | AASSL | QQSYST |
| | (SEQ ID | YADSVKG | WLFDY | YLN (SEQ | QS | PLT |
| | NO: 44) | (SEQ ID NO: | (SEQ ID NO: | ID NO: 54) | (SEQ | (SEQ ID |
| | | 45) | 76) | | ID NO: | NO: 56) |
| | | | | | 55) | |
| Consensus | SYAMS | AISGSGGSTY | REWX₁X₂X₃ | RASQSISS | AASSL | QQSYST |
| | (SEQ ID | YADSVKG | X₄X₅X₆WX₇ | YLN (SEQ | QS | PLT |
| | NO: 44) | (SEQ ID NO: | X₈DY, | ID NO: 54) | (SEQ | (SEQ ID |
| | | 45) | wherein X₁ is | | ID NO: | NO: 56) |
| | | | absent or V; | | 55) | |
| | | | X₂ is absent | | | |
| | | | or P; X₃ is W | | | |
| | | | or Y; X₄ is G, | | | |
| | | | Y, or D; X₅ is | | | |
| | | | E, D, or V; X₆ | | | |
| | | | is S or D; X₇ | | | |
| | | | is L or Y; and | | | |
| | | | X₈ is F or L | | | |
| | | | (SEQ ID NO: | | | |
| | | | 84) | | | |

TABLE 4
Chothia CDRs of exemplary PALLAS-derived anti-BCMA molecules

| Chothia | HCDR1 | HCDR2 | HCDR3 | LCDR1 | LCDR2 | LCDR3 |
|---|---|---|---|---|---|---|
| R1B6 | GFTFSSY | SGSGGS | REWVPYDV | SQSISSY | AAS | SYSTPL |
| | (SEQ ID | (SEQ ID NO: | SWYFDY | (SEQ ID | (SEQ | (SEQ ID |
| | NO: 47) | 48) | (SEQ ID NO: | NO: 57) | ID NO: | NO: 59) |
| | | | 46) | | 58) | |
| R1F2 | GFTFSSY | SGSGGS | REWWYDD | SQSISSY | AAS | SYSTPL |
| | (SEQ ID | (SEQ ID NO: | WYLDY | (SEQ ID | (SEQ | (SEQ ID |
| | NO: 47) | 48) | (SEQ ID NO: | NO: 57) | ID NO: | NO: 59) |
| | | | 68) | | 58) | |
| R1G5 | GFTFSSY | SGSGGS | REWWGES | SQSISSY | AAS | SYSTPL |
| | (SEQ ID | (SEQ ID NO: | WLFDY | (SEQ ID | (SEQ | (SEQ ID |
| | NO: 47) | 48) | (SEQ ID NO: | NO: 57) | ID NO: | NO: 59) |
| | | | 76) | | 58) | |
| Consensus | GFTFSSY | SGSGGS | REWX₁X₂X₃ | SQSISSY | AAS | SYSTPL |
| | (SEQ ID | (SEQ ID NO: | X₄X₅X₆WX₇ | (SEQ ID | (SEQ | (SEQ ID |
| | NO: 47) | 48) | X₈DY, | NO: 57) | ID NO: | NO: 59) |
| | | | wherein X₁ is | | 58) | |
| | | | absent or V; | | | |
| | | | X₂ is absent | | | |
| | | | or P; X₃ is W | | | |
| | | | or Y; X₄ is G, | | | |
| | | | Y, or D; X₅ is | | | |
| | | | E, D, or V; X₆ | | | |
| | | | is S or D; X₇ | | | |
| | | | is L or Y; and | | | |
| | | | X₈ is F or L | | | |
| | | | (SEQ ID NO: | | | |
| | | | 84) | | | |

TABLE 5
IMGT CDRs of exemplary PALLAS-derived anti-BCMA molecules

| IMGT | HCDR1 | HCDR2 | HCDR3 | LCDR1 | LCDR2 | LCDR3 |
|---|---|---|---|---|---|---|
| R1B6 | GFTFSSY | ISGSGGST | ARREWVPY | QSISSY | AAS | QQSYST |
| | A (SEQ ID | (SEQ ID NO: | DVSWYFDY | (SEQ ID | (SEQ | PLT |
| | NO: 49) | 50) | (SEQ ID NO: | NO: 60) | ID NO: | (SEQ ID |
| | | | 51) | | 58) | NO: 56) |
| R1F2 | GFTFSSY | ISGSGGST | ARREWWY | QSISSY | AAS | QQSYST |
| | A (SEQ ID | (SEQ ID NO: | DDWYLDY | (SEQ ID | (SEQ | PLT |
| | NO: 49) | 50) | (SEQ ID NO: | NO: 60) | ID NO: | (SEQ ID |
| | | | 69) | | 58) | NO: 56) |
| R1G5 | GFTFSSY | ISGSGGST | ARREWWG | QSISSY | AAS | QQSYST |
| | A (SEQ ID | (SEQ ID NO: | ESWLFDY | (SEQ ID | (SEQ | PLT |
| | NO: 49) | 50) | (SEQ ID NO: | NO: 60) | ID NO: | (SEQ ID |
| | | | 77) | | 58) | NO: 56) |
| Consensus | GFTFSSY | ISGSGGST | ARREWX₁X₂ | QSISSY | AAS | QQSYST |
| | A (SEQ ID | (SEQ ID NO: | X₃X₄X₅X₆W | (SEQ ID | (SEQ | PLT |
| | NO: 49) | 50) | X₇X₈DY, | NO: 60) | ID NO: | (SEQ ID |
| | | | wherein X₁ is | | 58) | NO: 56) |
| | | | absent or V; | | | |
| | | | X₂ is absent | | | |
| | | | or P; X₃ is W | | | |
| | | | or Y; X₄ is G, | | | |
| | | | Y, or D; X₅ is | | | |
| | | | E, D, or V; X₆ | | | |
| | | | is S or D; X₇ | | | |
| | | | is L or Y; and | | | |
| | | | X₈ is F or L | | | |
| | | | (SEQ ID NO: | | | |
| | | | 85) | | | |

TABLE 6
Amino acid and nucleic acid sequences of exemplary B cell-derived anti-BCMA
molecules

| SEQ | Name/ | |
|---|---|---|
| ID NO | Description | Sequence |
| PI61 | | |
| SEQ ID | HCDR1 | SYGMH |
| NO: 86 | (Kabat) | |
| SEQ ID | HCDR2 | VISYDGSNKYYADSVKG |
| NO: 87 | (Kabat) | |
| SEQ ID | HCDR3 | SGYALHDDYYGLDV |
| NO: 88 | (Kabat) | |
| SEQ ID | HCDR1 | GFTFSSY |
| NO: 47 | (Chothia) | |
| SEQ ID | HCDR2 | SYDGSN |
| NO: 89 | (Chothia) | |
| SEQ ID | HCDR3 | SGYALHDDYYGLDV |
| NO: 88 | (Chothia) | |
| SEQ ID | HCDR1 | GFTFSSYG |
| NO: 90 | (IMGT) | |
| SEQ ID | HCDR2 | ISYDGSNK |
| NO: 91 | (IMGT) | |
| SEQ ID | HCDR3 | GGSGYALHDDYYGLDV |
| NO: 92 | (IMGT) | |
| SEQ ID | VH | QVQLQESGGGVVQPGRSLRLSCAASGFTFSSYGMHWVRQAP |
| NO: 93 | | GKGLEWVAVISYDGSNKYYADSVKGRFTISRDNSKNTLYLQ |
| | | MNSLRAEDTAVYYCGGSGYALHDDYYGLDVWGQGTLVTV |
| | | SS |
| SEQ ID | DNA VH | CAAGTGCAGCTGCAGGAATCCGGTGGCGGAGTCGTGCAG |
| NO: 94 | | CCTGGAAGGAGCCTGAGACTCTCATGCGCCGCGTCAGGGT |
| | | TCACCTTTTCCTCCTACGGGATGCATTGGGTCAGACAGGC |
| | | CCCCGGAAAGGGACTCGAATGGGTGGCTGTGATCAGCTAC |
| | | GACGGCTCCAACAAGTACTACGCCGACTCCGTGAAAGGCC |
| | | GGTTCACTATCTCCCGGGACAACTCCAAGAACACGCTGTA |
| | | TCTGCAAATGAATTCACTGCGCGCGGAGGATACCGCTGTG |
| | | TACTACTGCGGTGGCTCCGGTTACGCCCTGCACGATGACT |
| | | ATTACGGCCTTGACGTCTGGGGCCAGGGAACCCTCGTGAC |
| | | TGTGTCCAGC |
| SEQ ID | LCDR1 | TGTSSDVGGYNYVS |
| NO: 95 | (Kabat) | |
| SEQ ID | LCDR2 | DVSNRPS |
| NO: 96 | (Kabat) | |
| SEQ ID | LCDR3 | SSYTSSSTLYV |
| NO: 97 | (Kabat) | |
| SEQ ID | LCDR1 | TSSDVGGYNY |
| NO: 98 | (Chothia) | |
| SEQ ID | LCDR2 | DVS |
| NO: 99 | (Chothia) | |
| SEQ ID | LCDR3 | YTSSSTLY |
| NO: | (Chothia) | |
| 100 | | |
| SEQ ID | LCDR1 | SSDVGGYNY |
| NO: | (IMGT) | |
| 101 | | |
| SEQ ID | LCDR2 | DVS |
| NO: 99 | (IMGT) | |
| SEQ ID | LCDR3 | SSYTSSSTLYV |
| NO: 97 | (IMGT) | |
| SEQ ID | VL | QSALTQPASVSGSPGQSITISCTGTSSDVGGYNYVSWYQQHP |
| NO: | | GKAPKLMIYDVSNRPSGVSNRFSGSKSGNTASLTISGLQAED |
| 102 | | EADYYCSSYTSSSTLYVFGSGTKVTVL |
| SEQ ID | DNA VL | CAGAGCGCACTGACTCAGCCGGCATCCGTGTCCGGTAGCC |
| NO: | | CCGGACAGTCGATTACCATCTCCTGTACCGGCACCTCCTC |
| 103 | | CGACGTGGGAGGGTACAACTACGTGTCGTGGTACCAGCA |
| | | GCACCCAGGAAAGGCCCCTAAGTTGATGATCTACGATGTG |
| | | TCAAACCGCCCGTCTGGAGTCTCCAACCGGTTCTCCGGCT |
| | | CCAAGTCCGGCAACACCGCCAGCCTGACCATTAGCGGGCT |
| | | GCAAGCCGAGGATGAGGCCGACTACTACTGCTCGAGCTAC |
| | | ACATCCTCGAGCACCCTCTACGTGTTCGGCTCGGGGACTA |
| | | AGGTCACCGTGCTG |
| SEQ ID | Linker | GGGGSGGGGSGGGGS |
| NO: | | |
| 104 | | |
| SEQ ID | scFv (VH- | QVQLQESGGGVVQPGRSLRLSCAASGFTFSSYGMHWVRQAP |
| NO: | linker-VL) | GKGLEWVAVISYDGSNKYYADSVKGRFTISRDNSKNTLYLQ |
| 105 | | MNSLRAEDTAVYYCGGSGYALHDDYYGLDVWGQGTLVTV |
| | | SSGGGGSGGGGSGGGGSQSALTQPASVSGSPGQSITISCTGTS |
| | | SDVGGYNYVSWYQQHPGKAPKLMIYDVSNRPSGVSNRFSGS |
| | | KSGNTASLTISGLQAEDEADYYCSSYTSSSTLYVFGSGTKVT |
| | | VL |
| SEQ ID | DNA scFv | CAAGTGCAGCTGCAGGAATCCGGTGGCGGAGTCGTGCAG |
| NO: | | CCTGGAAGGAGCCTGAGACTCTCATGCGCCGCGTCAGGGT |
| 106 | | TCACCTTTTCCTCCTACGGGATGCATTGGGTCAGACAGGC |
| | | CCCCGGAAAGGGACTCGAATGGGTGGCTGTGATCAGCTAC |
| | | GACGGCTCCAACAAGTACTACGCCGACTCCGTGAAAGGCC |
| | | GGTTCACTATCTCCCGGGACAACTCCAAGAACACGCTGTA |
| | | TCTGCAAATGAATTCACTGCGCGCGGAGGATACCGCTGTG |
| | | TACTACTGCGGTGGCTCCGGTTACGCCCTGCACGATGACT |
| | | ATTACGGCCTTGACGTCTGGGGCCAGGGAACCCTCGTGAC |
| | | TGTGTCCAGCGGTGGAGGAGGTTCGGGCGGAGGAGGATC |
| | | AGGAGGGGGTGGATCGCAGAGCGCACTGACTCAGCCGGC |
| | | ATCCGTGTCCGGTAGCCCCGGACAGTCGATTACCATCTCC |
| | | TGTACCGGCACCTCCTCCGACGTGGGAGGGTACAACTACG |
| | | TGTCGTGGTACCAGCAGCACCCAGGAAAGGCCCCTAAGTT |
| | | GATGATCTACGATGTGTCAAACCGCCCGTCTGGAGTCTCC |
| | | AACCGGTTCTCCGGCTCCAAGTCCGGCAACACCGCCAGCC |
| | | TGACCATTAGCGGGCTGCAAGCCGAGGATGAGGCCGACT |
| | | ACTACTGCTCGAGCTACACATCCTCGAGCACCCTCTACGT |
| | | GTTCGGCTCGGGGACTAAGGTCACCGTGCTG |
| SEQ ID | Full CAR | QVQLQESGGGVVQPGRSLRLSCAASGFTFSSYGMHWVRQAP |
| NO: | amino acid | GKGLEWVAVISYDGSNKYYADSVKGRFTISRDNSKNTLYLQ |
| 107 | sequence | MNSLRAEDTAVYYCGGSGYALHDDYYGLDVWGQGTLVTV |
| | | SSGGGGSGGGGSGGGGSQSALTQPASVSGSPGQSITISCTGTS |
| | | SDVGGYNYVSWYQQHPGKAPKLMIYDVSNRPSGVSNRFSGS |
| | | KSGNTASLTISGLQAEDEADYYCSSYTSSSTLYVFGSGTKVT |
| | | VLTTTPAPRPPTPAPTIASQPLSLRPEACRPAAGGAVHTRGLD |
| | | FACDIYIWAPLAGTCGVLLLSLVITLYCKRGRKKLLYIFKQPF |
| | | MRPVQTTQEEDGCSCRFPEEEEGGCELRVKFSRSADAPAYQ |
| | | QGQNQLYNELNLGRREEYDVLDKRRGRDPEMGGKPRRKNP |
| | | QEGLYNELQKDKMAEAYSEIGMKGERRRGKGHDGLYQGLS |
| | | TATKDTYDALHMQALPPR |
| SEQ ID | Full CAR | CAAGTGCAGCTGCAGGAATCCGGTGGCGGAGTCGTGCAG |
| NO: | DNA | CCTGGAAGGAGCCTGAGACTCTCATGCGCCGCGTCAGGGT |
| 108 | sequence | TCACCTTTTCCTCCTACGGGATGCATTGGGTCAGACAGGC |
| | | CCCCGGAAAGGGACTCGAATGGGTGGCTGTGATCAGCTAC |
| | | GACGGCTCCAACAAGTACTACGCCGACTCCGTGAAAGGCC |
| | | GGTTCACTATCTCCCGGGACAACTCCAAGAACACGCTGTA |
| | | TCTGCAAATGAATTCACTGCGCGCGGAGGATACCGCTGTG |
| | | TACTACTGCGGTGGCTCCGGTTACGCCCTGCACGATGACT |
| | | ATTACGGCCTTGACGTCTGGGGCCAGGGAACCCTCGTGAC |
| | | TGTGTCCAGCGGTGGAGGAGGTTCGGGCGGAGGAGGATC |
| | | AGGAGGGGGTGGATCGCAGAGCGCACTGACTCAGCCGGC |
| | | ATCCGTGTCCGGTAGCCCCGGACAGTCGATTACCATCTCC |
| | | TGTACCGGCACCTCCTCCGACGTGGGAGGGTACAACTACG |
| | | TGTCGTGGTACCAGCAGCACCCAGGAAAGGCCCCTAAGTT |
| | | GATGATCTACGATGTGTCAAACCGCCCGTCTGGAGTCTCC |
| | | AACCGGTTCTCCGGCTCCAAGTCCGGCAACACCGCCAGCC |
| | | TGACCATTAGCGGGCTGCAAGCCGAGGATGAGGCCGACT |
| | | ACTACTGCTCGAGCTACACATCCTCGAGCACCCTCTACGT |
| | | GTTCGGCTCGGGGACTAAGGTCACCGTGCTGACCACTACC |
| | | CCAGCACCGAGGCCACCCACCCCGGCTCCTACCATCGCCT |
| | | CCCAGCCTCTGTCCCTGCGTCCGGAGGCATGTAGACCCGC |
| | | AGCTGGTGGGGCCGTGCATACCCGGGGTCTTGACTTCGCC |
| | | TGCGATATCTACATTTGGGCCCCTCTGGCTGGTACTTGCGG |
| | | GGTCCTGCTGCTTTCACTCGTGATCACTCTTTACTGTAAGC |
| | | GCGGTCGGAAGAAGCTGCTGTACATCTTTAAGCAACCCTT |
| | | CATGAGGCCTGTGCAGACTACTCAAGAGGAGGACGGCTG |
| | | TTCATGCCGGTTCCCAGAGGAGGAGGAAGGCGGCTGCGA |
| | | ACTGCGCGTGAAATTCAGCCGCAGCGCAGATGCTCCAGCC |
| | | TACCAGCAGGGGCAGAACCAGCTCTACAACGAACTCAAT |
| | | CTTGGTCGGAGAGAGGAGTACGACGTGCTGGACAAGCGG |
| | | AGAGGACGGGACCCAGAAATGGGCGGGAAGCCGCGCAGA |
| | | AAGAATCCCCAAGAGGGCCTGTACAACGAGCTCCAAAAG |
| | | GATAAGATGGCAGAAGCCTATAGCGAGATTGGTATGAAA |
| | | GGGGAACGCAGAAGAGGCAAAGGCCACGACGGACTGTAC |
| | | CAGGGACTCAGCACCGCCACcaaggacacctatgacgctcttcacatgcagg |
| | | ccctgccgcctcgg |
| B61-02 | | |
| SEQ ID | HCDR1 | SYGMH |
| NO: 86 | (Kabat) | |
| SEQ ID | HCDR2 | VISYKGSNKYYADSVKG |
| NO: | (Kabat) | |
| 109 | | |
| SEQ ID | HCDR3 | SGYALHDDYYGLDV |
| NO: 88 | (Kabat) | |
| SEQ ID | HCDR1 | GFTFSSY |
| NO: 47 | (Chothia) | |
| SEQ ID | HCDR2 | SYKGSN |
| NO: | (Chothia) | |
| 110 | | |
| SEQ ID | HCDR3 | SGYALHDDYYGLDV |
| NO: 88 | (Chothia) | |
| SEQ ID | HCDR1 | GFTFSSYG |
| NO: 90 | (IMGT) | |
| SEQ ID | HCDR2 | ISYKGSNK |
| NO: | (IMGT) | |
| 111 | | |
| SEQ ID | HCDR3 | GGSGYALHDDYYGLDV |
| NO: 92 | (IMGT) | |
| SEQ ID | VH | QVQLVESGGGVVQPGRSLRLSCAASGFTFSSYGMHWVRQAP |
| NO: | | GKGLEWVAVISYKGSNKYYADSVKGRFTISRDNSKNTLYLQ |
| 112 | | MNSLRAEDTAVYYCGGSGYALHDDYYGLDVWGQGTLVTV |
| | | SS |
| SEQ ID | DNA VH | CAAGTGCAGCTTGTCGAATCGGGAGGCGGAGTGGTGCAG |
| NO: | | CCTGGACGATCGCTCCGGCTCTCATGTGCCGCGAGCGGAT |
| 113 | | TCACCTTCTCGAGCTACGGCATGCACTGGGTCAGACAAGC |
| | | CCCAGGAAAGGGCCTGGAATGGGTGGCTGTCATCTCGTAC |
| | | AAGGGCTCAAACAAGTACTACGCCGACTCCGTGAAGGGC |
| | | CGGTTCACCATCTCCCGCGATAACTCCAAGAATACCCTCT |
| | | ATCTGCAAATGAACAGCCTGAGGGCCGAGGATACTGCAG |
| | | TGTACTACTGCGGGGGTTCAGGCTACGCGCTGCACGACGA |
| | | CTACTACGGATTGGACGTCTGGGGCCAAGGAACTCTTGTG |
| | | ACCGTGTCCTCT |
| SEQ ID | LCDR1 | TGTSSDVGGYNYVS |
| NO: 95 | (Kabat) | |
| SEQ ID | LCDR2 | EVSNRLR |
| NO: | (Kabat) | |
| 114 | | |
| SEQ ID | LCDR3 | SSYTSSSALYV |
| NO: | (Kabat) | |
| 115 | | |
| SEQ ID | LCDR1 | TSSDVGGYNY |
| NO: 98 | (Chothia) | |
| SEQ ID | LCDR2 | EVS |
| NO: | (Chothia) | |
| 116 | | |
| SEQ ID | LCDR3 | YTSSSALY |
| NO: | (Chothia) | |
| 117 | | |
| SEQ ID | LCDR1 | SSDVGGYNY |
| NO: | (IMGT) | |
| 101 | | |
| SEQ ID | LCDR2 | EVS |
| NO: | (IMGT) | |
| 116 | | |
| SEQ ID | LCDR3 | SSYTSSSALYV |
| NO: | (IMGT) | |
| 115 | | |
| SEQ ID | VL | QSALTQPASVSGSPGQSITISCTGTSSDVGGYNYVSWYQQHP |
| NO: | | GKAPKLMIYEVSNRLRGVSNRFSGSKSGNTASLTISGLQAED |
| 118 | | EADYYCSSYTSSSALYVFGSGTKVTVL |
| SEQ ID | DNA VL | CAGAGCGCGCTGACTCAGCCTGCCTCCGTGAGCGGTTCGC |
| NO: | | CGGGACAGTCCATTACCATTTCGTGCACCGGGACCTCCTC |
| 119 | | CGACGTGGGAGGCTACAACTACGTGTCCTGGTACCAGCAG |
| | | CATCCCGGAAAGGCCCCGAAGCTGATGATCTACGAAGTGT |
| | | CGAACAGACTGCGGGGAGTCTCCAACCGCTTTTCCGGGTC |
| | | CAAGTCCGGCAACACCGCCAGCCTGACCATCAGCGGGCTC |
| | | CAGGCAGAAGATGAGGCTGACTATTACTGCTCCTCCTACA |
| | | CGTCAAGCTCCGCCCTCTACGTGTTCGGGTCCGGGACCAA |
| | | AGTCACTGTGCTG |
| SEQ ID | Linker | GGGGSGGGGSGGGGSGGGGS |
| NO: 63 | | |
| SEQ ID | scFv (VH- | QVQLVESGGGVVQPGRSLRLSCAASGFTFSSYGMHWVRQAP |
| NO: | linker-VL) | GKGLEWVAVISYKGSNKYYADSVKGRFTISRDNSKNTLYLQ |
| 120 | | MNSLRAEDTAVYYCGGSGYALHDDYYGLDVWGQGTLVTV |
| | | SSGGGGSGGGGSGGGGSGGGGSQSALTQPASVSGSPGQSITI |
| | | SCTGTSSDVGGYNYVSWYQQHPGKAPKLMIYEVSNRLRGVS |
| | | NRFSGSKSGNTASLTISGLQAEDEADYYCSSYTSSSALYVFGS |
| | | GTKVTVL |
| SEQ ID | DNA scFv | CAAGTGCAGCTTGTCGAATCGGGAGGCGGAGTGGTGCAG |
| NO: | | CCTGGACGATCGCTCCGGCTCTCATGTGCCGCGAGCGGAT |
| 121 | | TCACCTTCTCGAGCTACGGCATGCACTGGGTCAGACAAGC |
| | | CCCAGGAAAGGGCCTGGAATGGGTGGCTGTCATCTCGTAC |
| | | AAGGGCTCAAACAAGTACTACGCCGACTCCGTGAAGGGC |
| | | CGGTTCACCATCTCCCGCGATAACTCCAAGAATACCCTCT |
| | | ATCTGCAAATGAACAGCCTGAGGGCCGAGGATACTGCAG |
| | | TGTACTACTGCGGGGGTTCAGGCTACGCGCTGCACGACGA |
| | | CTACTACGGATTGGACGTCTGGGGCCAAGGAACTCTTGTG |
| | | ACCGTGTCCTCTGGTGGAGGCGGATCAGGGGGTGGCGGAT |
| | | CTGGGGGTGGTGGTTCCGGGGGAGGAGGATCGCAGAGCG |
| | | CGCTGACTCAGCCTGCCTCCGTGAGCGGTTCGCCGGGACA |
| | | GTCCATTACCATTTCGTGCACCGGGACCTCCTCCGACGTG |
| | | GGAGGCTACAACTACGTGTCCTGGTACCAGCAGCATCCCG |
| | | GAAAGGCCCCGAAGCTGATGATCTACGAAGTGTCGAACA |
| | | GACTGCGGGGAGTCTCCAACCGCTTTTCCGGGTCCAAGTC |
| | | CGGCAACACCGCCAGCCTGACCATCAGCGGGCTCCAGGC |
| | | AGAAGATGAGGCTGACTATTACTGCTCCTCCTACACGTCA |
| | | AGCTCCGCCCTCTACGTGTTCGGGTCCGGGACCAAAGTCA |
| | | CTGTGCTG |
| SEQ ID | Full CAR | QVQLVESGGGVVQPGRSLRLSCAASGFTFSSYGMHWVRQAP |
| NO: | amino acid | GKGLEWVAVISYKGSNKYYADSVKGRFTISRDNSKNTLYLQ |
| 122 | sequence | MNSLRAEDTAVYYCGGSGYALHDDYYGLDVWGQGTLVTV |
| | | SSGGGGSGGGGSGGGGSGGGGSQSALTQPASVSGSPGQSITI |
| | | SCTGTSSDVGGYNYVSWYQQHPGKAPKLMIYEVSNRLRGVS |
| | | NRFSGSKSGNTASLTISGLQAEDEADYYCSSYTSSSALYVFGS |
| | | GTKVTVLTTTPAPRPPTPAPTIASQPLSLRPEACRPAAGGAVH |
| | | TRGLDFACDIYIWAPLAGTCGVLLLSLVITLYCKRGRKKLLYI |
| | | FKQPFMRPVQTTQEEDGCSCRFPEEEEGGCELRVKFSRSADA |
| | | PAYQQGQNQLYNELNLGRREEYDVLDKRRGRDPEMGGKPR |
| | | RKNPQEGLYNELQKDKMAEAYSEIGMKGERRRGKGHDGLY |
| | | QGLSTATKDTYDALHMQALPPR |
| SEQ ID | Full CAR | CAAGTGCAGCTTGTCGAATCGGGAGGCGGAGTGGTGCAG |
| NO: | DNA | CCTGGACGATCGCTCCGGCTCTCATGTGCCGCGAGCGGAT |
| 123 | sequence | TCACCTTCTCGAGCTACGGCATGCACTGGGTCAGACAAGC |
| | | CCCAGGAAAGGGCCTGGAATGGGTGGCTGTCATCTCGTAC |
| | | AAGGGCTCAAACAAGTACTACGCCGACTCCGTGAAGGGC |
| | | CGGTTCACCATCTCCCGCGATAACTCCAAGAATACCCTCT |
| | | ATCTGCAAATGAACAGCCTGAGGGCCGAGGATACTGCAG |
| | | TGTACTACTGCGGGGGTTCAGGCTACGCGCTGCACGACGA |
| | | CTACTACGGATTGGACGTCTGGGGCCAAGGAACTCTTGTG |
| | | ACCGTGTCCTCTGGTGGAGGCGGATCAGGGGGTGGCGGAT |
| | | CTGGGGGTGGTGGTTCCGGGGGAGGAGGATCGCAGAGCG |
| | | CGCTGACTCAGCCTGCCTCCGTGAGCGGTTCGCCGGGACA |
| | | GTCCATTACCATTTCGTGCACCGGGACCTCCTCCGACGTG |
| | | GGAGGCTACAACTACGTGTCCTGGTACCAGCAGCATCCCG |
| | | GAAAGGCCCCGAAGCTGATGATCTACGAAGTGTCGAACA |
| | | GACTGCGGGGAGTCTCCAACCGCTTTTCCGGGTCCAAGTC |
| | | CGGCAACACCGCCAGCCTGACCATCAGCGGGCTCCAGGC |
| | | AGAAGATGAGGCTGACTATTACTGCTCCTCCTACACGTCA |
| | | AGCTCCGCCCTCTACGTGTTCGGGTCCGGGACCAAAGTCA |
| | | CTGTGCTGACCACTACCCCAGCACCGAGGCCACCCACCCC |
| | | GGCTCCTACCATCGCCTCCCAGCCTCTGTCCCTGCGTCCGG |
| | | AGGCATGTAGACCCGCAGCTGGTGGGGCCGTGCATACCCG |
| | | GGGTCTTGACTTCGCCTGCGATATCTACATTTGGGCCCCTC |
| | | TGGCTGGTACTTGCGGGGTCCTGCTGCTTTCACTCGTGATC |
| | | ACTCTTTACTGTAAGCGCGGTCGGAAGAAGCTGCTGTACA |
| | | TCTTTAAGCAACCCTTCATGAGGCCTGTGCAGACTACTCA |
| | | AGAGGAGGACGGCTGTTCATGCCGGTTCCCAGAGGAGGA |
| | | GGAAGGCGGCTGCGAACTGCGCGTGAAATTCAGCCGCAG |
| | | CGCAGATGCTCCAGCCTACCAGCAGGGGCAGAACCAGCT |
| | | CTACAACGAACTCAATCTTGGTCGGAGAGAGGAGTACGA |
| | | CGTGCTGGACAAGCGGAGAGGACGGGACCCAGAAATGGG |
| | | CGGGAAGCCGCGCAGAAAGAATCCCCAAGAGGGCCTGTA |
| | | CAACGAGCTCCAAAAGGATAAGATGGCAGAAGCCTATAG |
| | | CGAGATTGGTATGAAAGGGGAACGCAGAAGAGGCAAAGG |
| | | CCACGACGGACTGTACCAGGGACTCAGCACCGCCACCAA |
| | | GGACACCTATGACGCTCTTCACATGCAGGCCCTGCCGCCT |
| | | CGG |
| B61-10 | | |
| SEQ ID | HCDR1 | SYGMH |
| NO: 86 | (Kabat) | |
| SEQ ID | HCDR2 | VISYKGSNKYYADSVKG |
| NO: | (Kabat) | |
| 109 | | |
| SEQ ID | HCDR3 | SGYALHDDYYGLDV |
| NO: 88 | (Kabat) | |
| SEQ ID | HCDR1 | GFTFSSY |
| NO: 47 | (Chothia) | |
| SEQ ID | HCDR2 | SYKGSN |
| NO: | (Chothia) | |
| 110 | | |
| SEQ ID | HCDR3 | SGYALHDDYYGLDV |
| NO: 88 | (Chothia) | |
| SEQ ID | HCDR1 | GFTFSSYG |
| NO: 90 | (IMGT) | |
| SEQ ID | HCDR2 | ISYKGSNK |
| NO: | (IMGT) | |
| 111 | | |
| SEQ ID | HCDR3 | GGSGYALHDDYYGLDV |
| NO: 92 | (IMGT) | |
| SEQ ID | VH | QVQLVESGGGVVQPGRSLRLSCAASGFTFSSYGMHWVRQAP |
| NO: | | GKGLEWVAVISYKGSNKYYADSVKGRFTISRDNSKNTLYLQ |
| 112 | | MNSLRAEDTAVYYCGGSGYALHDDYYGLDVWGQGTLVTV |
| | | SS |
| SEQ ID | DNA VH | CAAGTGCAGCTTGTCGAATCGGGAGGCGGAGTGGTGCAG |
| NO: | | CCTGGACGATCGCTCCGGCTCTCATGTGCCGCGAGCGGAT |
| 113 | | TCACCTTCTCGAGCTACGGCATGCACTGGGTCAGACAAGC |
| | | CCCAGGAAAGGGCCTGGAATGGGTGGCTGTCATCTCGTAC |
| | | AAGGGCTCAAACAAGTACTACGCCGACTCCGTGAAGGGC |
| | | CGGTTCACCATCTCCCGCGATAACTCCAAGAATACCCTCT |
| | | ATCTGCAAATGAACAGCCTGAGGGCCGAGGATACTGCAG |
| | | TGTACTACTGCGGGGGTTCAGGCTACGCGCTGCACGACGA |
| | | CTACTACGGATTGGACGTCTGGGGCCAAGGAACTCTTGTG |
| | | ACCGTGTCCTCT |
| SEQ ID | LCDR1 | TGTSSDVGGYNYVS |
| NO: 95 | (Kabat) | |
| SEQ ID | LCDR2 | EVSNRLR |
| NO: | (Kabat) | |
| 114 | | |
| SEQ ID | LCDR3 | SSYTSSSTLYV |
| NO: 97 | (Kabat) | |
| SEQ ID | LCDR1 | TSSDVGGYNY |
| NO: 98 | (Chothia) | |
| SEQ ID | LCDR2 | EVS |
| NO: | (Chothia) | |
| 116 | | |
| SEQ ID | LCDR3 | YTSSSTLY |
| NO: | (Chothia) | |
| 100 | | |
| SEQ ID | LCDR1 | SSDVGGYNY |
| NO: | (IMGT) | |
| 101 | | |
| SEQ ID | LCDR2 | EVS |
| NO: | (IMGT) | |
| 116 | | |
| SEQ ID | LCDR3 | SSYTSSSTLYV |
| NO: 97 | (IMGT) | |
| SEQ ID | VL | QSALTQPASVSGSPGQSITISCTGTSSDVGGYNYVSWYQQHP |
| NO: | | GKAPKLMIYEVSNRLRGVSNRFSGSKSGNTASLTISGLQAED |
| 124 | | EADYYCSSYTSSSTLYVFGSGTKVTVL |
| SEQ ID | DNA VL | CAGAGCGCGCTGACTCAGCCTGCCTCCGTGAGCGGTTCGC |
| NO: | | CGGGACAGTCCATTACCATTTCGTGCACCGGGACCTCCTC |
| 125 | | CGACGTGGGAGGCTACAACTACGTGTCCTGGTACCAGCAG |
| | | CATCCCGGAAAGGCCCCGAAGCTGATGATCTACGAAGTGT |
| | | CGAACAGACTGCGGGGAGTCTCCAACCGCTTTTCCGGGTC |
| | | CAAGTCCGGCAACACCGCCAGCCTGACCATCAGCGGGCTC |
| | | CAGGCAGAAGATGAGGCTGACTATTACTGCTCCTCCTACA |
| | | CGTCAAGCTCCACCCTCTACGTGTTCGGGTCCGGGACCAA |
| | | AGTCACTGTGCTG |
| SEQ ID | Linker | GGGGSGGGGSGGGGSGGGGS |
| NO: 63 | | |
| SEQ ID | scFv (VH- | QVQLVESGGGVVQPGRSLRLSCAASGFTFSSYGMHWVRQAP |
| NO: | linker-VL) | GKGLEWVAVISYKGSNKYYADSVKGRFTISRDNSKNTLYLQ |
| 126 | | MNSLRAEDTAVYYCGGSGYALHDDYYGLDVWGQGTLVTV |
| | | SSGGGGSGGGGSGGGGSGGGGSQSALTQPASVSGSPGQSITI |
| | | SCTGTSSDVGGYNYVSWYQQHPGKAPKLMIYEVSNRLRGVS |
| | | NRFSGSKSGNTASLTISGLQAEDEADYYCSSYTSSSTLYVFGS |
| | | GTKVTVL |
| SEQ ID | DNA scFv | CAAGTGCAGCTTGTCGAATCGGGAGGCGGAGTGGTGCAG |
| NO: | | CCTGGACGATCGCTCCGGCTCTCATGTGCCGCGAGCGGAT |
| 127 | | TCACCTTCTCGAGCTACGGCATGCACTGGGTCAGACAAGC |
| | | CCCAGGAAAGGGCCTGGAATGGGTGGCTGTCATCTCGTAC |
| | | AAGGGCTCAAACAAGTACTACGCCGACTCCGTGAAGGGC |
| | | CGGTTCACCATCTCCCGCGATAACTCCAAGAATACCCTCT |
| | | ATCTGCAAATGAACAGCCTGAGGGCCGAGGATACTGCAG |
| | | TGTACTACTGCGGGGGTTCAGGCTACGCGCTGCACGACGA |
| | | CTACTACGGATTGGACGTCTGGGGCCAAGGAACTCTTGTG |
| | | ACCGTGTCCTCTGGTGGAGGCGGATCAGGGGGTGGCGGAT |
| | | CTGGGGGTGGTGGTTCCGGGGGAGGAGGATCGCAGAGCG |
| | | CGCTGACTCAGCCTGCCTCCGTGAGCGGTTCGCCGGGACA |
| | | GTCCATTACCATTTCGTGCACCGGGACCTCCTCCGACGTG |
| | | GGAGGCTACAACTACGTGTCCTGGTACCAGCAGCATCCCG |
| | | GAAAGGCCCCGAAGCTGATGATCTACGAAGTGTCGAACA |
| | | GACTGCGGGGAGTCTCCAACCGCTTTTCCGGGTCCAAGTC |
| | | CGGCAACACCGCCAGCCTGACCATCAGCGGGCTCCAGGC |
| | | AGAAGATGAGGCTGACTATTACTGCTCCTCCTACACGTCA |
| | | AGCTCCACCCTCTACGTGTTCGGGTCCGGGACCAAAGTCA |
| | | CTGTGCTG |
| SEQ ID | Full CAR | QVQLVESGGGVVQPGRSLRLSCAASGFTFSSYGMHWVRQAP |
| NO: | amino acid | GKGLEWVAVISYKGSNKYYADSVKGRFTISRDNSKNTLYLQ |
| 128 | sequence | MNSLRAEDTAVYYCGGSGYALHDDYYGLDVWGQGTLVTV |
| | | SSGGGGSGGGGSGGGGSGGGGSQSALTQPASVSGSPGQSITI |
| | | SCTGTSSDVGGYNYVSWYQQHPGKAPKLMIYEVSNRLRGVS |
| | | NRFSGSKSGNTASLTISGLQAEDEADYYCSSYTSSSTLYVFGS |
| | | GTKVTVLTTTPAPRPPTPAPTIASQPLSLRPEACRPAAGGAVH |
| | | TRGLDFACDIYIWAPLAGTCGVLLLSLVITLYCKRGRKKLLYI |
| | | FKQPFMRPVQTTQEEDGCSCRFPEEEEGGCELRVKFSRSADA |
| | | PAYQQGQNQLYNELNLGRREEYDVLDKRRGRDPEMGGKPR |
| | | RKNPQEGLYNELQKDKMAEAYSEIGMKGERRRGKGHDGLY |
| | | QGLSTATKDTYDALHMQALPPR |
| SEQ ID | Full CAR | CAAGTGCAGCTTGTCGAATCGGGAGGCGGAGTGGTGCAG |
| NO: | DNA | CCTGGACGATCGCTCCGGCTCTCATGTGCCGCGAGCGGAT |
| 129 | sequence | TCACCTTCTCGAGCTACGGCATGCACTGGGTCAGACAAGC |
| | | CCCAGGAAAGGGCCTGGAATGGGTGGCTGTCATCTCGTAC |
| | | AAGGGCTCAAACAAGTACTACGCCGACTCCGTGAAGGGC |
| | | CGGTTCACCATCTCCCGCGATAACTCCAAGAATACCCTCT |
| | | ATCTGCAAATGAACAGCCTGAGGGCCGAGGATACTGCAG |
| | | TGTACTACTGCGGGGGTTCAGGCTACGCGCTGCACGACGA |
| | | CTACTACGGATTGGACGTCTGGGGCCAAGGAACTCTTGTG |
| | | ACCGTGTCCTCTGGTGGAGGCGGATCAGGGGGTGGCGGAT |
| | | CTGGGGGTGGTGGTTCCGGGGGAGGAGGATCGCAGAGCG |
| | | CGCTGACTCAGCCTGCCTCCGTGAGCGGTTCGCCGGGACA |
| | | GTCCATTACCATTTCGTGCACCGGGACCTCCTCCGACGTG |
| | | GGAGGCTACAACTACGTGTCCTGGTACCAGCAGCATCCCG |
| | | GAAAGGCCCCGAAGCTGATGATCTACGAAGTGTCGAACA |
| | | GACTGCGGGGAGTCTCCAACCGCTTTTCCGGGTCCAAGTC |
| | | CGGCAACACCGCCAGCCTGACCATCAGCGGGCTCCAGGC |
| | | AGAAGATGAGGCTGACTATTACTGCTCCTCCTACACGTCA |
| | | AGCTCCACCCTCTACGTGTTCGGGTCCGGGACCAAAGTCA |
| | | CTGTGCTGACCACTACCCCAGCACCGAGGCCACCCACCCC |
| | | GGCTCCTACCATCGCCTCCCAGCCTCTGTCCCTGCGTCCGG |
| | | AGGCATGTAGACCCGCAGCTGGTGGGGCCGTGCATACCCG |
| | | GGGTCTTGACTTCGCCTGCGATATCTACATTTGGGCCCCTC |
| | | TGGCTGGTACTTGCGGGGTCCTGCTGCTTTCACTCGTGATC |
| | | ACTCTTTACTGTAAGCGCGGTCGGAAGAAGCTGCTGTACA |
| | | TCTTTAAGCAACCCTTCATGAGGCCTGTGCAGACTACTCA |
| | | AGAGGAGGACGGCTGTTCATGCCGGTTCCCAGAGGAGGA |
| | | GGAAGGCGGCTGCGAACTGCGCGTGAAATTCAGCCGCAG |
| | | CGCAGATGCTCCAGCCTACCAGCAGGGGCAGAACCAGCT |
| | | CTACAACGAACTCAATCTTGGTCGGAGAGAGGAGTACGA |
| | | CGTGCTGGACAAGCGGAGAGGACGGGACCCAGAAATGGG |
| | | CGGGAAGCCGCGCAGAAAGAATCCCCAAGAGGGCCTGTA |
| | | CAACGAGCTCCAAAAGGATAAGATGGCAGAAGCCTATAG |
| | | CGAGATTGGTATGAAAGGGGAACGCAGAAGAGGCAAAGG |
| | | CCACGACGGACTGTACCAGGGACTCAGCACCGCCACCAA |
| | | GGACACCTATGACGCTCTTCACATGCAGGCCCTGCCGCCT |
| | | CGG |

TABLE 7
Kabat CDRs of exemplary B cell-derived anti-BCMA molecules

| Kabat | HCDR1 | HCDR2 | HCDR3 | LCDR1 | LCDR2 | LCDR3 |
|---|---|---|---|---|---|---|
| PI61 | SYGMH | VISYDGSN | SGYALHD | TGTSSD | DVSNRPS | SSYTSSS |
| | (SEQ ID | KYYADSV | DYYGLDV | VGGYNY | (SEQ ID NO: | TLYV |
| | NO: 86) | KG (SEQ | (SEQ ID | VS (SEQ | 96) | (SEQ ID |
| | | ID NO: 87) | NO: 88) | ID NO: | | NO: 97) |
| | | | | 95) | | |
| B61-02 | SYGMH | VISYKGSN | SGYALHD | TGTSSD | EVSNRLR | SSYTSSS |
| | (SEQ ID | KYYADSV | DYYGLDV | VGGYNY | (SEQ ID NO: | ALYV |
| | NO: 86) | KG (SEQ | (SEQ ID | VS (SEQ | 114) | (SEQ ID |
| | | ID NO: | NO: 88) | ID NO: | | NO: 115) |
| | | 109) | | 95) | | |
| B61-10 | SYGMH | VISYKGSN | SGYALHD | TGTSSD | EVSNRLR | SSYTSSS |
| | (SEQ ID | KYYADSV | DYYGLDV | VGGYNY | (SEQ ID NO: | TLYV |
| | NO: 86) | KG (SEQ | (SEQ ID | VS (SEQ | 114) | (SEQ ID |
| | | ID NO: | NO: 88) | ID NO: | | NO: 97) |
| | | 109) | | 95) | | |
| Consensus | SYGMH | VISYXGSN | SGYALHD | TGTSSD | X₁VSNRX₂X₃, | SSYTSSS |
| | (SEQ ID | KYYADSV | DYYGLDV | VGGYNY | wherein X₁ | XLYV, |
| | NO: 86) | KG, | (SEQ ID | VS (SEQ | is D or E; X₂ | wherein |
| | | wherein X | NO: 88) | ID NO: | is P or L; and | X is T or |
| | | is D or K | | 95) | X₃ is S or R | A (SEQ |
| | | (SEQ ID | | | (SEQ ID NO: | ID NO: |
| | | NO: 130) | | | 131) | 132) |

TABLE 8
Chothia CDRs of exemplary B cell-derived anti-BCMA molecules

| Chothia | HCDR1 | HCDR2 | HCDR3 | LCDR1 | LCDR2 | LCDR3 |
|---|---|---|---|---|---|---|
| PI61 | GFTFSS | SYDGSN | SGYALHDDY | TSSDVGG | DVS | YTSSSTL |
| | Y (SEQ | (SEQ ID | YGLDV (SEQ | YNY (SEQ | (SEQ ID | Y (SEQ ID |
| | ID NO: | NO: 89) | ID NO: 88) | ID NO: 98) | NO: 99) | NO: 100) |
| | 47) | | | | | |
| B61-02 | GFTFSS | SYKGSN | SGYALHDDY | TSSDVGG | EVS | YTSSSAL |
| | Y (SEQ | (SEQ ID | YGLDV (SEQ | YNY (SEQ | (SEQ ID | Y (SEQ ID |
| | ID NO: | NO: 110) | ID NO: 88) | ID NO: 98) | NO: 116) | NO: 117) |
| | 47) | | | | | |
| B61-10 | GFTFSS | SYKGSN | SGYALHDDY | TSSDVGG | EVS | YTSSSTL |
| | Y (SEQ | (SEQ ID | YGLDV (SEQ | YNY (SEQ | (SEQ ID | Y (SEQ ID |
| | ID NO: | NO: 110) | ID NO: 88) | ID NO: 98) | NO: 116) | NO: 100) |
| | 47) | | | | | |
| Consensus | GFTFSS | SYXGSN, | SGYALHDDY | TSSDVGG | XVS, | YTSSSXL |
| | Y (SEQ | wherein X | YGLDV (SEQ | YNY (SEQ | wherein X | Y, wherein |
| | ID NO: | is D or K | ID NO: 88) | ID NO: 98) | is D or E | X is T or A |
| | 47) | (SEQ ID | | | (SEQ ID | (SEQ ID |
| | | NO: 133) | | | NO: 134) | NO: 135) |

TABLE 9
IMGT CDRs of exemplary B cell-derived anti-BCMA molecules

| IMGT | HCDR1 | HCDR2 | HCDR3 | LCDR1 | LCDR2 | LCDR3 |
|---|---|---|---|---|---|---|
| PI61 | GFTFSSY | ISYDGSN | GGSGYALHD | SSDVGGY | DVS | SSYTSSST |
| | G (SEQ ID | K (SEQ | DYYGLDV | NY (SEQ | (SEQ ID | LYV (SEQ |
| | NO: 90) | ID NO: | (SEQ ID NO: | ID NO: | NO: 99) | ID NO: 97) |
| | | 91) | 92) | 101) | | |
| B61-02 | GFTFSSY | ISYKGSN | GGSGYALHD | SSDVGGY | EVS | SSYTSSSA |
| | G (SEQ ID | K (SEQ | DYYGLDV | NY (SEQ | (SEQ ID | LYV (SEQ |
| | NO: 90) | ID NO: | (SEQ ID NO: | ID NO: | NO: | ID NO: |
| | | 111) | 92) | 101) | 116) | 115) |
| B61-10 | GFTFSSY | ISYKGSN | GGSGYALHD | SSDVGGY | EVS | SSYTSSST |
| | G (SEQ ID | K (SEQ | DYYGLDV | NY (SEQ | (SEQ ID | LYV (SEQ |
| | NO: 90) | ID NO: | (SEQ ID NO: | ID NO: | NO: | ID NO: 97) |
| | | 111) | 92) | 101) | 116) | |
| Consensus | GFTFSSY | ISYXGSN | GGSGYALHD | SSDVGGY | XVS, | SSYTSSSX |
| | G (SEQ ID | K, | DYYGLDV | NY (SEQ | wherein | LYV, |
| | NO: 90) | wherein X | (SEQ ID NO: | ID NO: | X is D | wherein X |
| | | is D or K | 92) | 101) | or E | is T or A |
| | | (SEQ ID | | | (SEQ ID | (SEQ ID |
| | | NO: 136) | | | NO: | NO: 132) |
| | | | | | 134) | |

TABLE 14
Amino acid and nucleic acid sequences of
exemplary anti-BCMA molecules based on PI61

| Identification | Protein sequence | DNA sequence (5′-3′) |
|---|---|---|
| Signal peptide | MALPVTALLLPLALLLHA | Atggccctccctgtcaccgctctgttgctgccgcttgctct |
| | ARP (SEQ ID NO: 2) | gctgctccacgcagcgcgaccg (SEQ ID NO: |
| | | 252) |
| ScFv PI61 | QVQLQESGGGVVQPGRS | CaggtacaattgcaggagtctggaggcggtgtgGtgca |
| | LRLSCAASGFTFSSYGMH | acccggtcgcagcttgcgcctgagttgtGctgcgtctgg |
| | WVRQAPGKGLEWVAVIS | atttacattttcatcttacggaAtgcattgggtacgccagg |
| | YDGSNKYYADSVKGRFT | caccggggaaaggcCttgaatgggtggctgtaatttcat |
| | ISRDNSKNTLYLQMNSLR | acgatggtTccaacaaatactatgctgactcagtcaagg |
| | AEDTAVYYCGGSGYALH | gtCgatttacaattagtcgggacaactccaagaacAccc |
| | DDYYGLDVWGQGTLVT | tttatcttcaaatgaattcccttagagcaGaggatacggcg |
| | VSSGGGGSGGGGSGGGG | gtctattactgtggtggcagtGgttatgcacttcatgatgat |
| | SQSALTQPASVSGSPGQSI | tactatggcttgGatgtctgggggcaagggacgcttgtaa |
| | TISCTGTSSDVGGYNYVS | ctgtaTcctctggtggtggtggtagtggtgggggaggc |
| | WYQQHPGKAPKLMIYDV | TccggcggtggcggctctcaatctgctctgactCaacca |
| | SNRPSGVSNRFSGSKSGN | gcaagcgtatcagggtcaccgggacagAgtattaccat |
| | TASLTISGLQAEDEADYY | aagttgcacggggacctctagcGatgtaggggggtata |
| | CSSYTSSSTLYVFGSGTK | attatgtatcttggtatCaacaacaccccgggaaagcccc |
| | VTVL (SEQ ID NO: 105) | taaattgatgAtctacgacgtgagcaatcgacctagtggc |
| | | gtaTcaaatcgcttctctggtagcaagagtgggaatAcg |
| | | gcgtcccttactattagcggattgcaagcaGaagatgag |
| | | gccgattactactgcagctcctatActagctcttctacattg |
| | | tacgtctttgggagcggaacaaaagtaacagtactc |
| | | (SEQ ID NO: 253) |
| Transmembrane | TTTPAPRPPTPAPTIASQP | AcaacaacacctgccccgagaccgcctacaccaGccc |
| domain and | LSLRPEACRPAAGGAVHT | cgactattgccagccagcctctgagcctcAggcctgag |
| hinge | RGLDFACDIYIWAPLAGT | gcctgtaggcccgcagcgggcggcGcagttcatacac |
| | CGVLLLSLVITLYC (SEQ | ggggcttggatttcgcttgtGatatttatatttgggctccttt |
| | ID NO: 202) | ggcggggacaTgtggcgtgctgcttctgtcacttgttatta |
| | | cactgtactgt (SEQ ID NO: 254) |
| 4-1BB | KRGRKKLLYIFKQPFMRP | AaacgcgggcgaaaaaaattgctgtatatttttAagcag |
| | VQTTQEEDGCSCRFPEEE | ccatttatgaggcccgttcagacgacgCaggaggagga |
| | EGGCEL (SEQ ID NO: 14) | cggttgctcttgcaggttcccagaagaggaagaagggg |
| | | gctgtgaattg (SEQ ID NO: 255) |
| CD3zeta | RVKFSRSADAPAYQQGQ | CgggttaaattttcaagatccgcagacgctccaGcatac |
| | NQLYNELNLGRREEYDV | caacagggacaaaaccaactctataacGagctgaatctt |
| | LDKRRGRDPEMGGKPRR | ggaagaagggaggaatatgatGtgctggataaacggcg |
| | KNPQEGLYNELQKDKMA | cggtagagatccggagAtgggcggaaaaccaaggcg |
| | EAYSEIGMKGERRRGKG | aaaaaaccctcagGagggactctacaacgaactgcaga |
| | HDGLYQGLSTATKDTYD | aagacaaaAtggcggaggcttattccgaaataggcatg |
| | ALHMQALPPR (SEQ ID | aagGgcgagcggaggcgagggaaagggcacgacgg |
| | NO: 20) | aCtgtatcaaggcctctcaaccgcgactaaggatAcgta |
| | | cgacgccctgcacatgcaggccctgcctccgaga |
| | | (SEQ ID NO: 256) |
| PI61 full CAR | MALPVTALLLPLALLLHA | ATGGCCCTCCCTGTCACCGCTCTGT |
| construct | ARPQVQLQESGGGVVQP | TGCTGCCGCTTGCTCTGCTGCTCCA |
| | GRSLRLSCAASGFTFSSY | CGCAGCGCGACCGCAGGTACAATT |
| | GMHWVRQAPGKGLEWV | GCAGGAGTCTGGAGGCGGTGTGGT |
| | AVISYDGSNKYYADSVK | GCAACCCGGTCGCAGCTTGCGCCT |
| | GRFTISRDNSKNTLYLQM | GAGTTGTGCTGCGTCTGGATTTACA |
| | NSLRAEDTAVYYCGGSG | TTTTCATCTTACGGAATGCATTGGG |
| | YALHDDYYGLDVWGQG | TACGCCAGGCACCGGGGAAAGGCC |
| | TLVTVSSGGGGSGGGGS | TTGAATGGGTGGCTGTAATTTCATA |
| | GGGGSQSALTQPASVSGS | CGATGGTTCCAACAAATACTATGCT |
| | PGQSITISCTGTSSDVGGY | GACTCAGTCAAGGGTCGATTTACA |
| | NYVSWYQQHPGKAPKL | ATTAGTCGGGACAACTCCAAGAAC |
| | MIYDVSNRPSGVSNRFSG | ACCCTTTATCTTCAAATGAATTCCC |
| | SKSGNTASLTISGLQAED | TTAGAGCAGAGGATACGGCGGTCT |
| | EADYYCSSYTSSSTLYVF | ATTACTGTGGTGGCAGTGGTTATGC |
| | GSGTKVTVLTTTPAPRPP | ACTTCATGATGATTACTATGGCTTG |
| | TPAPTIASQPLSLRPEACR | GATGTCTGGGGGCAAGGGACGCTT |
| | PAAGGAVHTRGLDFACD | GTAACTGTATCCTCTGGTGGTGGTG |
| | IYIWAPLAGTCGVLLLSL | GTAGTGGTGGGGGAGGCTCCGGCG |
| | VITLYCKRGRKKLLYIFK | GTGGCGGCTCTCAATCTGCTCTGAC |
| | QPFMRPVQTTQEEDGCSC | TCAACCAGCAAGCGTATCAGGGTC |
| | RFPEEEEGGCELRVKFSR | ACCGGGACAGAGTATTACCATAAG |
| | SADAPAYQQGQNQLYNE | TTGCACGGGGACCTCTAGCGATGT |
| | LNLGRREEYDVLDKRRG | AGGGGGGTATAATTATGTATCTTGG |
| | RDPEMGGKPRRKNPQEG | TATCAACAACACCCCGGGAAAGCC |
| | LYNELQKDKMAEAYSEI | CCTAAATTGATGATCTACGACGTGA |
| | GMKGERRRGKGHDGLY | GCAATCGACCTAGTGGCGTATCAA |
| | QGLSTATKDTYDALHMQ | ATCGCTTCTCTGGTAGCAAGAGTGG |
| | ALPPR (SEQ ID NO: 257) | GAATACGGCGTCCCTTACTATTAGC |
| | | GGATTGCAAGCAGAAGATGAGGCC |
| | | GATTACTACTGCAGCTCCTATACTA |
| | | GCTCTTCTACATTGTACGTCTTTGG |
| | | GAGCGGAACAAAAGTAACAGTACT |
| | | CACAACAACACCTGCCCCGAGACC |
| | | GCCTACACCAGCCCCGACTATTGCC |
| | | AGCCAGCCTCTGAGCCTCAGGCCT |
| | | GAGGCCTGTAGGCCCGCAGCGGGC |
| | | GGCGCAGTTCATACACGGGGCTTG |
| | | GATTTCGCTTGTGATATTTATATTT |
| | | GGGCTCCTTTGGCGGGGACATGTG |
| | | GCGTGCTGCTTCTGTCACTTGTTAT |
| | | TACACTGTACTGTAAACGCGGGCG |
| | | AAAAAAATTGCTGTATATTTTTAAG |
| | | CAGCCATTTATGAGGCCCGTTCAGA |
| | | CGACGCAGGAGGAGGACGGTTGCT |
| | | CTTGCAGGTTCCCAGAAGAGGAAG |
| | | AAGGGGGCTGTGAATTGCGGGTTA |
| | | AATTTTCAAGATCCGCAGACGCTCC |
| | | AGCATACCAACAGGGACAAAACCA |
| | | ACTCTATAACGAGCTGAATCTTGGA |
| | | AGAAGGGAGGAATATGATGTGCTG |
| | | GATAAACGGCGCGGTAGAGATCCG |
| | | GAGATGGGCGGAAAACCAAGGCGA |
| | | AAAAACCCTCAGGAGGGACTCTAC |
| | | AACGAACTGCAGAAAGACAAAATG |
| | | GCGGAGGCTTATTCCGAAATAGGC |
| | | ATGAAGGGCGAGCGGAGGCGAGG |
| | | GAAAGGGCACGACGGACTGTATCA |
| | | AGGCCTCTCAACCGCGACTAAGGA |
| | | TACGTACGACGCCCTGCACATGCA |
| | | GGCCCTGCCTCCGAGA (SEQ ID NO: |
| | | 258) |
| PI61 mature | QVQLQESGGGVVQPGRS | |
| CAR protein | LRLSCAASGFTFSSYGMH | |
| | WVRQAPGKGLEWVAVIS | |
| | YDGSNKYYADSVKGRFT | |
| | ISRDNSKNTLYLQMNSLR | |
| | AEDTAVYYCGGSGYALH | |
| | DDYYGLDVWGQGTLVT | |
| | VSSGGGGSGGGGSGGGG | |
| | SQSALTQPASVSGSPGQSI | |
| | TISCTGTSSDVGGYNYVS | |
| | WYQQHPGKAPKLMIYDV | |
| | SNRPSGVSNRFSGSKSGN | |
| | TASLTISGLQAEDEADYY | |
| | CSSYTSSSTLYVFGSGTK | |
| | VTVLTTTPAPRPPTPAPTI | |
| | ASQPLSLRPEACRPAAGG | |
| | AVHTRGLDFACDIYIWAP | |
| | LAGTCGVLLLSLVITLYC | |
| | KRGRKKLLYIFKQPFMRP | |
| | VQTTQEEDGCSCRFPEEE | |
| | EGGCELRVKFSRSADAPA | |
| | YQQGQNQLYNELNLGRR | |
| | EEYDVLDKRRGRDPEMG | |
| | GKPRRKNPQEGLYNELQ | |
| | KDKMAEAYSEIGMKGER | |
| | RRGKGHDGLYQGLSTAT | |
| | KDTYDALHMQALPPR | |
| | (SEQ ID NO: 107) | |

TABLE 10
Amino acid and nucleic acid sequences of
exemplary hybridoma-derived anti-BCMA molecules

| SEQ | Name/ | |
|---|---|---|
| ID NO | Description | Sequence |
| Hy03 | | |
| SEQ ID | HCDR1 | GFWMS |
| NO: | (Kabat) | |
| 137 | | |
| SEQ ID | HCDR2 | NIKQDGSEKYYVDSVRG |
| NO: | (Kabat) | |
| 138 | | |
| SEQ ID | HCDR3 | ALDYYGMDV |
| NO: | (Kabat) | |
| 139 | | |
| SEQ ID | HCDR1 | GFTFSGF |
| NO: | (Chothia) | |
| 140 | | |
| SEQ ID | HCDR2 | KQDGSE |
| NO: | (Chothia) | |
| 141 | | |
| SEQ ID | HCDR3 | ALDYYGMDV |
| NO: | (Chothia) | |
| 139 | | |
| SEQ ID | HCDR1 | GFTFSGFW |
| NO: | (IMGT) | |
| 142 | | |
| SEQ ID | HCDR2 | IKQDGSEK |
| NO: | (IMGT) | |
| 143 | | |
| SEQ ID | HCDR3 | ARALDYYGMDV |
| NO: | (IMGT) | |
| 144 | | |
| SEQ ID | VH | EVQLVESGGGLVQPGGSLRLSCAASGFTFSGFWMSWVRQA |
| NO: | | PGKGLEWVANIKQDGSEKYYVDSVRGRFTISRDNAKNSLYL |
| 145 | | QMNSLRAEDTAVYYCARALDYYGMDVWGQGTTVTVSS |
| SEQ ID | DNA VH | GAAGTGCAACTGGTGGAGAGCGGTGGAGGGCTTGTCCAG |
| NO: | | CCCGGAGGATCGCTGCGGCTGTCCTGTGCTGCGTCCGGGT |
| 146 | | TCACCTTCTCCGGCTTCTGGATGTCCTGGGTCAGACAGGC |
| | | ACCGGGAAAGGGCCTCGAATGGGTGGCCAACATCAAGCA |
| | | GGATGGCTCCGAGAAGTACTACGTCGACTCCGTGAGAGG |
| | | CCGCTTCACCATCTCCCGGGACAACGCCAAGAACTCGCT |
| | | GTACCTCCAAATGAATAGCCTCAGGGCGGAAGATACTGC |
| | | TGTGTATTACTGCGCACGCGCCCTTGACTACTACGGCATG |
| | | GACGTCTGGGGCCAAGGGACCACTGTGACCGTGTCTAGC |
| SEQ ID | LCDR1 | RSSQSLLDSDDGNTYLD |
| NO: | (Kabat) | |
| 147 | | |
| SEQ ID | LCDR2 | TLSYRAS |
| NO: | (Kabat) | |
| 148 | | |
| SEQ ID | LCDR3 | TQRLEFPSIT |
| NO: | (Kabat) | |
| 149 | | |
| SEQ ID | LCDR1 | SQSLLDSDDGNTY |
| NO: | (Chothia) | |
| 150 | | |
| SEQ ID | LCDR2 | TLS |
| NO: | (Chothia) | |
| 151 | | |
| SEQ ID | LCDR3 | RLEFPSI |
| NO: | (Chothia) | |
| 152 | | |
| SEQ ID | LCDR1 | QSLLDSDDGNTY |
| NO: | (IMGT) | |
| 153 | | |
| SEQ ID | LCDR2 | TLS |
| NO: | (IMGT) | |
| 151 | | |
| SEQ ID | LCDR3 | TQRLEFPSIT |
| NO: | (IMGT) | |
| 149 | | |
| SEQ ID | VL | DIVMTQTPLSLPVTPGEPASISCRSSQSLLDSDDGNTYLDWY |
| NO: | | LQKPGQSPRLLIYTLSYRASGVPDRFSGSGSGTDFTLKISRVE |
| 154 | | AEDVGLYYCTQRLEFPSITFGQGTRLEIK |
| SEQ ID | DNA VL | GATATCGTGATGACCCAGACTCCCCTGTCCCTGCCTGTGA |
| NO: | | CTCCCGGAGAACCAGCCTCCATTTCCTGCCGGTCCTCCCA |
| 155 | | GTCCCTGCTGGACAGCGACGACGGCAACACTTACCTGGA |
| | | CTGGTACTTGCAGAAGCCGGGCCAATCGCCTCGCCTGCTG |
| | | ATCTATACCCTGTCATACCGGGCCTCAGGAGTGCCTGACC |
| | | GCTTCTCGGGATCAGGGAGCGGGACCGATTTCACCCTGA |
| | | AAATTTCCCGAGTGGAAGCCGAGGACGTCGGACTGTACT |
| | | ACTGCACCCAGCGCCTCGAATTCCCGTCGATTACGTTTGG |
| | | ACAGGGTACCCGGCTTGAGATCAAG |
| SEQ ID | Linker | GGGGSGGGGSGGGGSGGGGS |
| NO: 63 | | |
| SEQ ID | scFv (VH- | EVQLVESGGGLVQPGGSLRLSCAASGFTFSGFWMSWVRQA |
| NO: | linker-VL) | PGKGLEWVANIKQDGSEKYYVDSVRGRFTISRDNAKNSLYL |
| 156 | | QMNSLRAEDTAVYYCARALDYYGMDVWGQGTTVTVSSG |
| | | GGGSGGGGSGGGGSGGGGSDIVMTQTPLSLPVTPGEPASISC |
| | | RSSQSLLDSDDGNTYLDWYLQKPGQSPRLLIYTLSYRASGV |
| | | PDRFSGSGSGTDFTLKISRVEAEDVGLYYCTQRLEFPSITFGQ |
| | | GTRLEIK |
| SEQ ID | DNA scFv | GAAGTGCAACTGGTGGAGAGCGGTGGAGGGCTTGTCCAG |
| NO: | | CCCGGAGGATCGCTGCGGCTGTCCTGTGCTGCGTCCGGGT |
| 157 | | TCACCTTCTCCGGCTTCTGGATGTCCTGGGTCAGACAGGC |
| | | ACCGGGAAAGGGCCTCGAATGGGTGGCCAACATCAAGCA |
| | | GGATGGCTCCGAGAAGTACTACGTCGACTCCGTGAGAGG |
| | | CCGCTTCACCATCTCCCGGGACAACGCCAAGAACTCGCT |
| | | GTACCTCCAAATGAATAGCCTCAGGGCGGAAGATACTGC |
| | | TGTGTATTACTGCGCACGCGCCCTTGACTACTACGGCATG |
| | | GACGTCTGGGGCCAAGGGACCACTGTGACCGTGTCTAGC |
| | | GGAGGCGGAGGTTCAGGGGGCGGTGGATCAGGCGGAGG |
| | | AGGATCGGGGGGTGGTGGATCGGATATCGTGATGACCCA |
| | | GACTCCCCTGTCCCTGCCTGTGACTCCCGGAGAACCAGCC |
| | | TCCATTTCCTGCCGGTCCTCCCAGTCCCTGCTGGACAGCG |
| | | ACGACGGCAACACTTACCTGGACTGGTACTTGCAGAAGC |
| | | CGGGCCAATCGCCTCGCCTGCTGATCTATACCCTGTCATA |
| | | CCGGGCCTCAGGAGTGCCTGACCGCTTCTCGGGATCAGG |
| | | GAGCGGGACCGATTTCACCCTGAAAATTTCCCGAGTGGA |
| | | AGCCGAGGACGTCGGACTGTACTACTGCACCCAGCGCCT |
| | | CGAATTCCCGTCGATTACGTTTGGACAGGGTACCCGGCTT |
| | | GAGATCAAG |
| SEQ ID | Full CAR | EVQLVESGGGLVQPGGSLRLSCAASGFTFSGFWMSWVRQA |
| NO: | amino acid | PGKGLEWVANIKQDGSEKYYVDSVRGRFTISRDNAKNSLYL |
| 158 | sequence | QMNSLRAEDTAVYYCARALDYYGMDVWGQGTTVTVSSG |
| | | GGGSGGGGSGGGGSGGGGSDIVMTQTPLSLPVTPGEPASISC |
| | | RSSQSLLDSDDGNTYLDWYLQKPGQSPRLLIYTLSYRASGV |
| | | PDRFSGSGSGTDFTLKISRVEAEDVGLYYCTQRLEFPSITFGQ |
| | | GTRLEIKTTTPAPRPPTPAPTIASQPLSLRPEACRPAAGGAVH |
| | | TRGLDFACDIYIWAPLAGTCGVLLLSLVITLYCKRGRKKLLY |
| | | IFKQPFMRPVQTTQEEDGCSCRFPEEEEGGCELRVKFSRSAD |
| | | APAYQQGQNQLYNELNLGRREEYDVLDKRRGRDPEMGGK |
| | | PRRKNPQEGLYNELQKDKMAEAYSEIGMKGERRRGKGHD |
| | | GLYQGLSTATKDTYDALHMQALPPR |
| SEQ ID | Full CAR | GAAGTGCAACTGGTGGAGAGCGGTGGAGGGCTTGTCCAG |
| NO: | DNA | CCCGGAGGATCGCTGCGGCTGTCCTGTGCTGCGTCCGGGT |
| 159 | sequence | TCACCTTCTCCGGCTTCTGGATGTCCTGGGTCAGACAGGC |
| | | ACCGGGAAAGGGCCTCGAATGGGTGGCCAACATCAAGCA |
| | | GGATGGCTCCGAGAAGTACTACGTCGACTCCGTGAGAGG |
| | | CCGCTTCACCATCTCCCGGGACAACGCCAAGAACTCGCT |
| | | GTACCTCCAAATGAATAGCCTCAGGGCGGAAGATACTGC |
| | | TGTGTATTACTGCGCACGCGCCCTTGACTACTACGGCATG |
| | | GACGTCTGGGGCCAAGGGACCACTGTGACCGTGTCTAGC |
| | | GGAGGCGGAGGTTCAGGGGGCGGTGGATCAGGCGGAGG |
| | | AGGATCGGGGGGTGGTGGATCGGATATCGTGATGACCCA |
| | | GACTCCCCTGTCCCTGCCTGTGACTCCCGGAGAACCAGCC |
| | | TCCATTTCCTGCCGGTCCTCCCAGTCCCTGCTGGACAGCG |
| | | ACGACGGCAACACTTACCTGGACTGGTACTTGCAGAAGC |
| | | CGGGCCAATCGCCTCGCCTGCTGATCTATACCCTGTCATA |
| | | CCGGGCCTCAGGAGTGCCTGACCGCTTCTCGGGATCAGG |
| | | GAGCGGGACCGATTTCACCCTGAAAATTTCCCGAGTGGA |
| | | AGCCGAGGACGTCGGACTGTACTACTGCACCCAGCGCCT |
| | | CGAATTCCCGTCGATTACGTTTGGACAGGGTACCCGGCTT |
| | | GAGATCAAGACCACTACCCCAGCACCGAGGCCACCCACC |
| | | CCGGCTCCTACCATCGCCTCCCAGCCTCTGTCCCTGCGTC |
| | | CGGAGGCATGTAGACCCGCAGCTGGTGGGGCCGTGCATA |
| | | CCCGGGGTCTTGACTTCGCCTGCGATATCTACATTTGGGC |
| | | CCCTCTGGCTGGTACTTGCGGGGTCCTGCTGCTTTCACTC |
| | | GTGATCACTCTTTACTGTAAGCGCGGTCGGAAGAAGCTG |
| | | CTGTACATCTTTAAGCAACCCTTCATGAGGCCTGTGCAGA |
| | | CTACTCAAGAGGAGGACGGCTGTTCATGCCGGTTCCCAG |
| | | AGGAGGAGGAAGGCGGCTGCGAACTGCGCGTGAAATTCA |
| | | GCCGCAGCGCAGATGCTCCAGCCTACCAGCAGGGGCAGA |
| | | ACCAGCTCTACAACGAACTCAATCTTGGTCGGAGAGAGG |
| | | AGTACGACGTGCTGGACAAGCGGAGAGGACGGGACCCA |
| | | GAAATGGGCGGGAAGCCGCGCAGAAAGAATCCCCAAGA |
| | | GGGCCTGTACAACGAGCTCCAAAAGGATAAGATGGCAGA |
| | | AGCCTATAGCGAGATTGGTATGAAAGGGGAACGCAGAAG |
| | | AGGCAAAGGCCACGACGGACTGTACCAGGGACTCAGCAC |
| | | CGCCACCAAGGACACCTATGACGCTCTTCACATGCAGGC |
| | | CCTGCCGCCTCGG |
| Hy52 | | |
| SEQ ID | HCDR1 | SFRMN |
| NO: | (Kabat) | |
| 160 | | |
| SEQ ID | HCDR2 | SISSSSSYIYYADSVKG |
| NO: | (Kabat) | |
| 161 | | |
| SEQ ID | HCDR3 | WLSYYGMDV |
| NO: | (Kabat) | |
| 162 | | |
| SEQ ID | HCDR1 | GFTFSSF |
| NO: | (Chothia) | |
| 163 | | |
| SEQ ID | HCDR2 | SSSSSY |
| NO: | (Chothia) | |
| 164 | | |
| SEQ ID | HCDR3 | WLSYYGMDV |
| NO: | (Chothia) | |
| 162 | | |
| SEQ ID | HCDR1 | GFTFSSFR |
| NO: | (IMGT) | |
| 165 | | |
| SEQ ID | HCDR2 | ISSSSSYI |
| NO: | (IMGT) | |
| 166 | | |
| SEQ ID | HCDR3 | ARWLSYYGMDV |
| NO: | (IMGT) | |
| 167 | | |
| SEQ ID | VH | EVQLVESGGGLVKPGGSLRLSCAASGFTFSSFRMNWVRQAP |
| NO: | | GKGLEWVSSISSSSSYIYYADSVKGRFTISRDNAKNSLYLQM |
| 168 | | NSLRAEDTAVYYCARWLSYYGMDVWGQGTTVTVSS |
| SEQ ID | DNA VH | GAAGTGCAACTGGTGGAGAGCGGTGGAGGGCTTGTCAAG |
| NO: | | CCCGGAGGATCGCTGCGGCTGTCCTGTGCTGCGTCCGGGT |
| 169 | | TCACCTTCTCCTCGTTCCGCATGAACTGGGTCAGACAGGC |
| | | ACCGGGAAAGGGCCTCGAATGGGTGTCCTCAATCTCATC |
| | | GTCCTCGTCCTACATCTACTACGCCGACTCCGTGAAAGGC |
| | | CGCTTCACCATCTCCCGGGACAACGCCAAGAACTCGCTGT |
| | | ACCTCCAAATGAATAGCCTCAGGGCGGAAGATACTGCTG |
| | | TGTATTACTGCGCACGCTGGCTTTCCTACTACGGCATGGA |
| | | CGTCTGGGGCCAAGGGACCACTGTGACCGTGTCTAGC |
| SEQ ID | LCDR1 | RSSQSLLDSDDGNTYLD |
| NO: | (Kabat) | |
| 147 | | |
| SEQ ID | LCDR2 | TLSFRAS |
| NO: | (Kabat) | |
| 170 | | |
| SEQ ID | LCDR3 | MQRIGFPIT |
| NO: | (Kabat) | |
| 171 | | |
| SEQ ID | LCDR1 | SQSLLDSDDGNTY |
| NO: | (Chothia) | |
| 150 | | |
| SEQ ID | LCDR2 | TLS |
| NO: | (Chothia) | |
| 151 | | |
| SEQ ID | LCDR3 | RIGFPI |
| NO: | (Chothia) | |
| 172 | | |
| SEQ ID | LCDR1 | QSLLDSDDGNTY |
| NO: | (IMGT) | |
| 153 | | |
| SEQ ID | LCDR2 | TLS |
| NO: | (IMGT) | |
| 151 | | |
| SEQ ID | LCDR3 | MQRIGFPIT |
| NO: | (IMGT) | |
| 171 | | |
| SEQ ID | VL | DIVMTQTPLSLPVTPGEPASISCRSSQSLLDSDDGNTYLDWY |
| NO: | | LQKPGQSPQLLIYTLSFRASGVPDRFSGSGSGTDFTLKIRRVE |
| 173 | | AEDVGVYYCMQRIGFPITFGQGTRLEIK |
| SEQ ID | DNA VL | GATATCGTGATGACCCAGACTCCCCTGTCCCTGCCTGTGA |
| NO: | | CTCCCGGAGAACCAGCCTCCATTTCCTGCCGGTCCTCCCA |
| 174 | | GTCCCTGCTGGACAGCGACGACGGCAACACTTACCTGGA |
| | | CTGGTACTTGCAGAAGCCGGGCCAATCGCCTCAGCTGCT |
| | | GATCTATACCCTGTCATTCCGGGCCTCAGGAGTGCCTGAC |
| | | CGCTTCTCGGGATCAGGGAGCGGGACCGATTTCACCCTG |
| | | AAAATTAGGCGAGTGGAAGCCGAGGACGTCGGAGTGTAC |
| | | TACTGCATGCAGCGCATCGGCTTCCCGATTACGTTTGGAC |
| | | AGGGTACCCGGCTTGAGATCAAG |
| SEQ ID | Linker | GGGGSGGGGSGGGGSGGGGS |
| NO: 63 | | |
| SEQ ID | scFv (VH- | EVQLVESGGGLVKPGGSLRLSCAASGFTFSSFRMNWVRQAP |
| NO: | linker-VL) | GKGLEWVSSISSSSSYIYYADSVKGRFTISRDNAKNSLYLQM |
| 175 | | NSLRAEDTAVYYCARWLSYYGMDVWGQGTTVTVSSGGGG |
| | | SGGGGSGGGGSGGGGSDIVMTQTPLSLPVTPGEPASISCRSS |
| | | QSLLDSDDGNTYLDWYLQKPGQSPQLLIYTLSFRASGVPDR |
| | | FSGSGSGTDFTLKIRRVEAEDVGVYYCMQRIGFPITFGQGTR |
| | | LEIK |
| SEQ ID | DNA scFv | GAAGTGCAACTGGTGGAGAGCGGTGGAGGGCTTGTCAAG |
| NO: | | CCCGGAGGATCGCTGCGGCTGTCCTGTGCTGCGTCCGGGT |
| 176 | | TCACCTTCTCCTCGTTCCGCATGAACTGGGTCAGACAGGC |
| | | ACCGGGAAAGGGCCTCGAATGGGTGTCCTCAATCTCATC |
| | | GTCCTCGTCCTACATCTACTACGCCGACTCCGTGAAAGGC |
| | | CGCTTCACCATCTCCCGGGACAACGCCAAGAACTCGCTGT |
| | | ACCTCCAAATGAATAGCCTCAGGGCGGAAGATACTGCTG |
| | | TGTATTACTGCGCACGCTGGCTTTCCTACTACGGCATGGA |
| | | CGTCTGGGGCCAAGGGACCACTGTGACCGTGTCTAGCGG |
| | | AGGCGGAGGTTCAGGGGGCGGTGGATCAGGCGGAGGAG |
| | | GATCGGGGGGTGGTGGATCGGATATCGTGATGACCCAGA |
| | | CTCCCCTGTCCCTGCCTGTGACTCCCGGAGAACCAGCCTC |
| | | CATTTCCTGCCGGTCCTCCCAGTCCCTGCTGGACAGCGAC |
| | | GACGGCAACACTTACCTGGACTGGTACTTGCAGAAGCCG |
| | | GGCCAATCGCCTCAGCTGCTGATCTATACCCTGTCATTCC |
| | | GGGCCTCAGGAGTGCCTGACCGCTTCTCGGGATCAGGGA |
| | | GCGGGACCGATTTCACCCTGAAAATTAGGCGAGTGGAAG |
| | | CCGAGGACGTCGGAGTGTACTACTGCATGCAGCGCATCG |
| | | GCTTCCCGATTACGTTTGGACAGGGTACCCGGCTTGAGAT |
| | | CAAG |
| SEQ ID | Full CAR | EVQLVESGGGLVKPGGSLRLSCAASGFTFSSFRMNWVRQAP |
| NO: | amino acid | GKGLEWVSSISSSSSYIYYADSVKGRFTISRDNAKNSLYLQM |
| 177 | sequence | NSLRAEDTAVYYCARWLSYYGMDVWGQGTTVTVSSGGGG |
| | | SGGGGSGGGGSGGGGSDIVMTQTPLSLPVTPGEPASISCRSS |
| | | QSLLDSDDGNTYLDWYLQKPGQSPQLLIYTLSFRASGVPDR |
| | | FSGSGSGTDFTLKIRRVEAEDVGVYYCMQRIGFPITFGQGTR |
| | | LEIKTTTPAPRPPTPAPTIASQPLSLRPEACRPAAGGAVHTRG |
| | | LDFACDIYIWAPLAGTCGVLLLSLVITLYCKRGRKKLLYIFK |
| | | QPFMRPVQTTQEEDGCSCRFPEEEEGGCELRVKFSRSADAP |
| | | AYQQGQNQLYNELNLGRREEYDVLDKRRGRDPEMGGKPR |
| | | RKNPQEGLYNELQKDKMAEAYSEIGMKGERRRGKGHDGL |
| | | YQGLSTATKDTYDALHMQALPPR |
| SEQ ID | Full CAR | GAAGTGCAACTGGTGGAGAGCGGTGGAGGGCTTGTCAAG |
| NO: | DNA | CCCGGAGGATCGCTGCGGCTGTCCTGTGCTGCGTCCGGGT |
| 178 | sequence | TCACCTTCTCCTCGTTCCGCATGAACTGGGTCAGACAGGC |
| | | ACCGGGAAAGGGCCTCGAATGGGTGTCCTCAATCTCATC |
| | | GTCCTCGTCCTACATCTACTACGCCGACTCCGTGAAAGGC |
| | | CGCTTCACCATCTCCCGGGACAACGCCAAGAACTCGCTGT |
| | | ACCTCCAAATGAATAGCCTCAGGGCGGAAGATACTGCTG |
| | | TGTATTACTGCGCACGCTGGCTTTCCTACTACGGCATGGA |
| | | CGTCTGGGGCCAAGGGACCACTGTGACCGTGTCTAGCGG |
| | | AGGCGGAGGTTCAGGGGGCGGTGGATCAGGCGGAGGAG |
| | | GATCGGGGGGTGGTGGATCGGATATCGTGATGACCCAGA |
| | | CTCCCCTGTCCCTGCCTGTGACTCCCGGAGAACCAGCCTC |
| | | CATTTCCTGCCGGTCCTCCCAGTCCCTGCTGGACAGCGAC |
| | | GACGGCAACACTTACCTGGACTGGTACTTGCAGAAGCCG |
| | | GGCCAATCGCCTCAGCTGCTGATCTATACCCTGTCATTCC |
| | | GGGCCTCAGGAGTGCCTGACCGCTTCTCGGGATCAGGGA |
| | | GCGGGACCGATTTCACCCTGAAAATTAGGCGAGTGGAAG |
| | | CCGAGGACGTCGGAGTGTACTACTGCATGCAGCGCATCG |
| | | GCTTCCCGATTACGTTTGGACAGGGTACCCGGCTTGAGAT |
| | | CAAGACCACTACCCCAGCACCGAGGCCACCCACCCCGGC |
| | | TCCTACCATCGCCTCCCAGCCTCTGTCCCTGCGTCCGGAG |
| | | GCATGTAGACCCGCAGCTGGTGGGGCCGTGCATACCCGG |
| | | GGTCTTGACTTCGCCTGCGATATCTACATTTGGGCCCCTC |
| | | TGGCTGGTACTTGCGGGGTCCTGCTGCTTTCACTCGTGAT |
| | | CACTCTTTACTGTAAGCGCGGTCGGAAGAAGCTGCTGTAC |
| | | ATCTTTAAGCAACCCTTCATGAGGCCTGTGCAGACTACTC |
| | | AAGAGGAGGACGGCTGTTCATGCCGGTTCCCAGAGGAGG |
| | | AGGAAGGCGGCTGCGAACTGCGCGTGAAATTCAGCCGCA |
| | | GCGCAGATGCTCCAGCCTACCAGCAGGGGCAGAACCAGC |
| | | TCTACAACGAACTCAATCTTGGTCGGAGAGAGGAGTACG |
| | | ACGTGCTGGACAAGCGGAGAGGACGGGACCCAGAAATG |
| | | GGCGGGAAGCCGCGCAGAAAGAATCCCCAAGAGGGCCT |
| | | GTACAACGAGCTCCAAAAGGATAAGATGGCAGAAGCCTA |
| | | TAGCGAGATTGGTATGAAAGGGGAACGCAGAAGAGGCA |
| | | AAGGCCACGACGGACTGTACCAGGGACTCAGCACCGCCA |
| | | CCAAGGACACCTATGACGCTCTTCACATGCAGGCCCTGCC |
| | | GCCTCGG |

TABLE 11
Kabat CDRs of exemplary hybridoma-derived anti-BCMA molecules

| Kabat | HCDR1 | HCDR2 | HCDR3 | LCDR1 | LCDR2 | LCDR3 |
|---|---|---|---|---|---|---|
| Hy03 | GFWMS | NIKQDGSEK | ALDYYGM | RSSQSLLD | TLSYRA | TQRLEF |
| | (SEQ ID | YYVDSVRG | DV (SEQ ID | SDDGNTY | S (SEQ | PSIT |
| | NO: 137) | (SEQ ID NO: | NO: 139) | LD (SEQ | ID NO: | (SEQ ID |
| | | 138) | | ID NO: | 148) | NO: 149) |
| | | | | 147) | | |
| Hy52 | SFRMN | SISSSSSYIY | WLSYYGM | RSSQSLLD | TLSFRA | MQRIGF |
| | (SEQ ID | YADSVKG | DV (SEQ ID | SDDGNTY | S (SEQ | PIT (SEQ |
| | NO: 160) | (SEQ ID NO: | NO: 162) | LD (SEQ | ID NO: | ID NO: |
| | | 161) | | ID NO: | 170) | 171) |
| | | | | 147) | | |
| Consensus | X₁FX₂MX₃, | X₁IX₂X₃X₄X₅ | X₁LX₂YYG | RSSQSLLD | TLSXRAS, | X₁QRX₂X₃F |
| | wherein | SX₆X₇YYX₈ | MDV, | SDDGNTY | wherein | PX₄IT, |
| | X₁ is G or | DSVX₉G, | wherein X₁ | LD (SEQ | X is Y or | wherein |
| | S; X₂ is W | wherein X₁ is | is A or W; | ID NO: | F (SEQ | X₁ is T or |
| | or R; and | N or S; X₂ is | and X₂ is | 147) | ID NO: | M; X₂ is |
| | X₃ is S or | K or S; X₃ is | D or S | | 182) | L or I; X₃ |
| | N (SEQ | Q or S; X₄ is | (SEQ ID | | | is E or G; |
| | ID NO: | D or S; X₅ is | NO: 181) | | | and X₄ is |
| | 179) | G or S; X₆ is | | | | S or |
| | | E or Y; X₇ is | | | | absent |
| | | K or I; X₈ is | | | | (SEQ ID |
| | | V or A; and | | | | NO: 183) |
| | | X₉ is R or K | | | | |
| | | (SEQ ID NO: | | | | |
| | | 180) | | | | |

TABLE 12
Chothia CDRs of exemplary hybridoma-derived anti-BCMA molecules

| Chothia | HCDR1 | HCDR2 | HCDR3 | LCDR1 | LCDR2 | LCDR3 |
|---|---|---|---|---|---|---|
| Hy03 | GFTFSGF | KQDGSE | ALDYYGM | SQSLLDS | TLS | RLEFPSI |
| | (SEQ ID | (SEQ ID NO: | DV (SEQ ID | DDGNTY | (SEQ | (SEQ ID |
| | NO: 140) | 141) | NO: 139) | (SEQ ID | ID NO: | NO: 152) |
| | | | | NO: 150) | 151) | |
| Hy52 | GFTFSSF | SSSSSY (SEQ | WLSYYGM | SQSLLDS | TLS | RIGFPI |
| | (SEQ ID | ID NO: 164) | DV (SEQ ID | DDGNTY | (SEQ | (SEQ ID |
| | NO: 163) | | NO: 162) | (SEQ ID | ID NO: | NO: 172) |
| | | | | NO: 150) | 151) | |
| Consensus | GFTFSXF, | X₁X₂X₃X₄SX₅, | X₁LX₂YYG | SQSLLDS | TLS | RX₁X₂FP |
| | wherein X | wherein X₁ is | MDV, | DDGNTY | (SEQ | X₃I, |
| | is G or S | K or S; X₂ is Q | wherein X₁ is | (SEQ ID | ID NO: | wherein |
| | (SEQ ID | or S; X₃ is D or | A or W; and | NO: 150) | 151) | X₁ is L or |
| | NO: 184) | S; X₄ is G or S; | X₂ is D or S | | | I; X₂ is E |
| | | and X₅ is E or | (SEQ ID NO: | | | or G; and |
| | | Y (SEQ ID | 181) | | | X₃ is S or |
| | | NO: 185) | | | | absent |
| | | | | | | (SEQ ID |
| | | | | | | NO: 186) |

TABLE 13
IMGT CDRs of exemplary hybridoma-derived anti-BCMA molecules

| IMGT | HCDR1 | HCDR2 | HCDR3 | LCDR1 | LCDR2 | LCDR3 |
|---|---|---|---|---|---|---|
| Hy03 | GFTFSGF | IKQDGSEK | ARALDYY | QSLLDSD | TLS | TQRLEFP |
| | W (SEQ ID | (SEQ ID | GMDV | DGNTY | (SEQ ID | SIT (SEQ |
| | NO: 142) | NO: 143) | (SEQ ID | (SEQ ID | NO: | ID NO: |
| | | | NO: 144) | NO: 153) | 151) | 149) |
| Hy52 | GFTFSSF | ISSSSSYI | ARWLSYY | QSLLDSD | TLS | MQRIGFP |
| | R (SEQ ID | (SEQ ID | GMDV | DGNTY | (SEQ ID | IT (SEQ |
| | NO: 165) | NO: 166) | (SEQ ID | (SEQ ID | NO: | ID NO: |
| | | | NO: 167) | NO: 153) | 151) | 171) |
| Consensus | GFTFSX₁F | IX₁X₂X₃X₄S | ARX₁LX₂Y | QSLLDSD | TLS | X₁QRX₂X₃ |
| | X₂, | X₅X₆, | YGMDV, | DGNTY | (SEQ ID | FPX₄IT, |
| | wherein X₁ | wherein X₁ is | wherein X₁ | (SEQ ID | NO: | wherein X₁ |
| | is G or S; | K or S; X₂ is | is A or W; | NO: 153) | 151) | is T or M; |
| | and X₂ is | Q or S; X₃ is | and X₂ is D | | | X₂ is L or |
| | W or R | D or S; X₄ is | or S | | | I; X₃ is E |
| | (SEQ ID | G or S; X₅ is | (SEQ ID | | | or G; and |
| | NO: 187) | E or Y; and | NO: 189) | | | X₄ is S or |
| | | X₆ is K or I | | | | absent |
| | | (SEQ ID | | | | (SEQ ID |
| | | NO: 188) | | | | NO: 183) |

[0371] In some embodiments, BCMA CARs may be generated using the VH and VL sequences from WO2012/0163805 (the contents of which are hereby incorporated by reference in its entirety). In some embodiments, BCMA CARs may be generated using the CDRs, VHs, VLs, scFvs, or full-CAR sequences from WO2019/241426 (the contents of which are hereby incorporated by reference in its entirety).

[0372] Other Exemplary Targets

[0373] Further non-limiting exemplary tumor antigens include CD20, CD22, EGFR, CD123, and CLL-1.

[0374] CARs that bind to CD20 are known in the art. For example, those disclosed in WO2018/067992 or WO2016/164731, incorporated by reference herein. Any known CD20 CAR, for example, the CD20 antigen binding domain of any known CD20 CAR, in the art can be used in accordance with the present disclosure. Exemplary CD20-binding sequences or CD20 CAR sequences are disclosed in, for example, Tables 1-5 of WO2018/067992, incorporated by reference. In some embodiments, the CD20 CAR comprises a CDR, variable region, scFv, or full-length sequence of a CD20 CAR disclosed in WO2018/067992 or WO2016/164731, both incorporated by reference herein. In some embodiments, CD20 CARs comprise a sequence, for example, a CDR, VH, VL, scFv, or full-CAR sequence, disclosed in Table 23 below, or a sequence having at least 70%, 75%, 80%, 85%, 90%, 95%, 96%, 97%, 98%, or 99% identity thereto.

TABLE 23
Amino acid sequences of exemplary anti-CD20 molecules

| SEQ ID NO: | Region | Sequence |
|---|---|---|
| CD20-C3H2 | | |
| 769 | HCDR1 | NYNLH |
| | (Kabat) | |
| 770 | HCDR2 | AIYPGNYDTSYNQKFKG |
| | (Kabat) | |
| 771 | HCDR3 | VDFGHSRYWYFDV |
| | (Kabat) | |
| 772 | HCDR1 | GYTFTNY |
| | (Chothia) | |
| 773 | HCDR2 | YPGNYD |
| | (Chothia) | |
| 771 | HCDR3 | VDFGHSRYWYFDV |
| | (Chothia) | |
| 774 | HCDR1 | GYTFTNYN |
| | (IMGT) | |
| 775 | HCDR2 | IYPGNYDT |
| | (IMGT) | |
| 776 | HCDR3 | ARVDFGHSRYWYFDV |
| | (IMGT) | |
| 777 | HCDR1 | GYTFTNYNLH |
| | (Combined) | |
| 770 | HCDR2 | AIYPGNYDTSYNQKFKG |
| | (Combined) | |
| 771 | HCDR3 | VDFGHSRYWYFDV |
| | (Combined) | |
| 778 | VH | QVQLVQSGAEVKKPGASVKVSCKASGYTFTNYNLHWVRQAP |
| | | GQGLEWMGAIYPGNYDTSYNQKFKGRVTMTADKSTSTAYME |
| | | LSSLRSEDTAVYYCARVDFGHSRYWYFDVWGQGTTVTVSS |
| 779 | DNA VH | CAAGTCCAACTCGTCCAGTCCGGTGCAGAAGTCAAGAAACC |
| | | TGGAGCATCCGTGAAAGTGTCTTGCAAAGCCTCCGGCTACA |
| | | CCTTCACCAACTACAACCTCCATTGGGTCAGACAGGCCCCC |
| | | GGACAAGGACTCGAATGGATGGGAGCGATCTACCCGGGAA |
| | | ACTACGACACCAGCTACAACCAGAAGTTCAAGGGCCGCGTG |
| | | ACTATGACCGCCGATAAGAGCACCTCCACCGCCTACATGGA |
| | | ACTGTCCTCGCTGAGGTCCGAGGACACTGCGGTGTACTACT |
| | | GCGCCCGCGTGGACTTCGGACACTCACGGTATTGGTACTTC |
| | | GACGTCTGGGGACAGGGCACTACCGTGACCGTGTCGAGC |
| 780 | LCDR1 | RATSSVSSMN |
| | (Kabat) | |
| 781 | LCDR2 | ATSNLAS |
| | (Kabat) | |
| 782 | LCDR3 | QQWTFNPPT |
| | (Kabat) | |
| 783 | LCDR1 | TSSVSS |
| | (Chothia) | |
| 784 | LCDR2 | ATS |
| | (Chothia) | |
| 785 | LCDR3 | WTFNPP |
| | (Chothia) | |
| 786 | LCDR1 | SSVSS |
| | (IMGT) | |
| 784 | LCDR2 | ATS |
| | (IMGT) | |
| 782 | LCDR3 | QQWTFNPPT |
| | (IMGT) | |
| 780 | LCDR1 | RATSSVSSMN |
| | (Combined) | |
| 781 | LCDR2 | ATSNLAS |
| | (Combined) | |
| 782 | LCDR3 | QQWTFNPPT |
| | (Combined) | |
| 787 | VL | DIQLTQSPSFLSASVGDRVTITCRATSSVSSMNWYQQKPGKAP |
| | | KPLIHATSNLASGVPSRFSGSGSGTEYTLTISSLQPEDFATYYCQ |
| | | QWTFNPPTFGQGTKLEIK |
| 788 | DNA VL | GATATCCAGCTGACTCAGTCCCCGTCATTCCTGTCCGCCTCC |
| | | GTGGGAGACAGAGTGACCATCACCTGTCGGGCCACTTCCTC |
| | | CGTGTCAAGCATGAACTGGTATCAGCAGAAGCCCGGGAAGG |
| | | CCCCAAAGCCGCTGATTCACGCGACGTCCAACCTGGCTTCC |
| | | GGCGTGCCGAGCCGGTTCTCCGGCTCGGGGAGCGGGACTGA |
| | | GTACACCCTGACTATTTCCTCGCTTCAACCCGAGGACTTTGC |
| | | TACCTACTACTGCCAACAGTGGACCTTCAATCCTCCGACATT |
| | | CGGACAGGGTACCAAGTTGGAAATCAAG |
| 789 | scFv (VH- | QVQLVQSGAEVKKPGASVKVSCKASGYTFTNYNLHWVRQAP |
| | linker-VL) | GQGLEWMGAIYPGNYDTSYNQKFKGRVTMTADKSTSTAYME |
| | | LSSLRSEDTAVYYCARVDFGHSRYWYFDVWGQGTTVTVSSGG |
| | | GGSGGGGSGGGGSGGGGSDIQLTQSPSFLSASVGDRVTITCRA |
| | | TSSVSSMNWYQQKPGKAPKPLIHATSNLASGVPSRFSGSGSGT |
| | | EYTLTISSLQPEDFATYYCQQWTFNPPTFGQGTKLEIK |
| 790 | DNA scFv | caagtccaactcgtccagtccggtgcagaagtcaagaaacctggagcatccgtgaaagtgtcttgc |
| | (VH-linker- | aaagcctccggctacaccttcaccaactacaacctccattgggtcagacaggcccccggacaagg |
| | VL) | actcgaatggatgggagcgatctacccgggaaactacgacaccagctacaaccagaagttcaagg |
| | | gccgcgtgactatgaccgccgataagagcacctccaccgcctacatggaactgtcctcgctgaggt |
| | | ccgaggacactgcggtgtactactgcgcccgcgtggacttcggacactcacggtattggtacttcga |
| | | cgtctggggacagggcactaccgtgaccgtgtcgagcggcggaggaggttcgggagggggcgg |
| | | atcagggggcggcggcagcggtggagggggctcggatatccagctgactcagtccccgtcattcc |
| | | tgtccgcctccgtgggagacagagtgaccatcacctgtcgggccacttcctccgtgtcaagcatgaa |
| | | ctggtatcagcagaagcccgggaaggccccaaagccgctgattcacgcgacgtccaacctggctt |
| | | ccggcgtgccgagccggttctccggctcggggagcgggactgagtacaccctgactatttcctcgc |
| | | ttcaacccgaggactttgctacctactactgccaacagtggaccttcaatcctccgacattcggacag |
| | | ggtaccaagttggaaatcaag |
| 791 | Full CAR | MALPVTALLLPLALLLHAARPQVQLVQSGAEVKKPGASVKVS |
| | amino acid | CKASGYTFTNYNLHWVRQAPGQGLEWMGAIYPGNYDTSYNQ |
| | sequence | KFKGRVTMTADKSTSTAYMELSSLRSEDTAVYYCARVDFGHS |
| | | RYWYFDVWGQGTTVTVSSGGGGSGGGGSGGGGSGGGGSDIQ |
| | | LTQSPSFLSASVGDRVTITCRATSSVSSMNWYQQKPGKAPKPLI |
| | | HATSNLASGVPSRFSGSGSGTEYTLTISSLQPEDFATYYCQQWT |
| | | FNPPTFGQGTKLEIKTTTPAPRPPTPAPTIASQPLSLRPEACRPAA |
| | | GGAVHTRGLDFACDIYIWAPLAGTCGVLLLSLVITLYCKRGRK |
| | | KLLYIFKQPFMRPVQTTQEEDGCSCRFPEEEEGGCELRVKFSRS |
| | | ADAPAYQQGQNQLYNELNLGRREEYDVLDKRRGRDPEMGGK |
| | | PRRKNPQEGLYNELQKDKMAEAYSEIGMKGERRRGKGHDGL |
| | | YQGLSTATKDTYDALHMQALPPR |
| 792 | Full CAR | ATGGCCCTCCCTGTCACCGCCCTGCTGCTTCCGCTGGCTCTT |
| | nucleotide | CTGCTCCACGCCGCTCGGCCCCAAGTCCAACTCGTCCAGTCC |
| | sequence | GGTGCAGAAGTCAAGAAACCTGGAGCATCCGTGAAAGTGTC |
| | | TTGCAAAGCCTCCGGCTACACCTTCACCAACTACAACCTCCA |
| | | TTGGGTCAGACAGGCCCCCGGACAAGGACTCGAATGGATGG |
| | | GAGCGATCTACCCGGGAAACTACGACACCAGCTACAACCAG |
| | | AAGTTCAAGGGCCGCGTGACTATGACCGCCGATAAGAGCAC |
| | | CTCCACCGCCTACATGGAACTGTCCTCGCTGAGGTCCGAGG |
| | | ACACTGCGGTGTACTACTGCGCCCGCGTGGACTTCGGACAC |
| | | TCACGGTATTGGTACTTCGACGTCTGGGGACAGGGCACTAC |
| | | CGTGACCGTGTCGAGCGGCGGAGGAGGTTCGGGAGGGGGC |
| | | GGATCAGGGGGCGGCGGCAGCGGTGGAGGGGGCTCGGATA |
| | | TCCAGCTGACTCAGTCCCCGTCATTCCTGTCCGCCTCCGTGG |
| | | GAGACAGAGTGACCATCACCTGTCGGGCCACTTCCTCCGTG |
| | | TCAAGCATGAACTGGTATCAGCAGAAGCCCGGGAAGGCCCC |
| | | AAAGCCGCTGATTCACGCGACGTCCAACCTGGCTTCCGGCG |
| | | TGCCGAGCCGGTTCTCCGGCTCGGGGAGCGGGACTGAGTAC |
| | | ACCCTGACTATTTCCTCGCTTCAACCCGAGGACTTTGCTACC |
| | | TACTACTGCCAACAGTGGACCTTCAATCCTCCGACATTCGGA |
| | | CAGGGTACCAAGTTGGAAATCAAGACCACTACCCCAGCACC |
| | | GAGGCCACCCACCCCGGCTCCTACCATCGCCTCCCAGCCTCT |
| | | GTCCCTGCGTCCGGAGGCATGTAGACCCGCAGCTGGTGGGG |
| | | CCGTGCATACCCGGGGTCTTGACTTCGCCTGCGATATCTACA |
| | | TTTGGGCCCCTCTGGCTGGTACTTGCGGGGTCCTGCTGCTTT |
| | | CACTCGTGATCACTCTTTACTGTAAGCGCGGTCGGAAGAAG |
| | | CTGCTGTACATCTTTAAGCAACCCTTCATGAGGCCTGTGCAG |
| | | ACTACTCAAGAGGAGGACGGCTGTTCATGCCGGTTCCCAGA |
| | | GGAGGAGGAAGGCGGCTGCGAACTGCGCGTGAAATTCAGC |
| | | CGCAGCGCAGATGCTCCAGCCTACCAGCAGGGGCAGAACCA |
| | | GCTCTACAACGAACTCAATCTTGGTCGGAGAGAGGAGTACG |
| | | ACGTGCTGGACAAGCGGAGAGGACGGGACCCAGAAATGGG |
| | | CGGGAAGCCGCGCAGAAAGAATCCCCAAGAGGGCCTGTAC |
| | | AACGAGCTCCAAAAGGATAAGATGGCAGAAGCCTATAGCG |
| | | AGATTGGTATGAAAGGGGAACGCAGAAGAGGCAAAGGCCA |
| | | CGACGGACTGTACCAGGGACTCAGCACCGCCACCAAGGACA |
| | | CCTATGACGCTCTTCACATGCAGGCCCTGCCGCCTCGG |
| CD20-C5H1 | | |
| 793 | HCDR1 | SYNMH |
| | (Kabat) | |
| 794 | HCDR2 | AIYPGNGDTSYNPKFKG |
| | (Kabat) | |
| 795 | HCDR3 | SYFYGSSSWYFDV |
| | (Kabat) | |
| 523 | HCDR1 | GYTFTSY |
| | (Chothia) | |
| 796 | HCDR2 | YPGNGD |
| | (Chothia) | |
| 795 | HCDR3 | SYFYGSSSWYFDV |
| | (Chothia) | |
| 797 | HCDR1 | GYTFTSYN |
| | (IMGT) | |
| 798 | HCDR2 | IYPGNGDT |
| | (IMGT) | |
| 799 | HCDR3 | ARSYFYGSSSWYFDV |
| | (IMGT) | |
| 800 | HCDR1 | GYTFTSYNMH |
| | (Combined) | |
| 794 | HCDR2 | AIYPGNGDTSYNPKFKG |
| | (Combined) | |
| 795 | HCDR3 | SYFYGSSSWYFDV |
| | (Combined) | |
| 801 | VH | QVQLVQSGAEVKKPGASVKVSCKASGYTFTSYNMHWVRQAP |
| | | GQGLEWMGAIYPGNGDTSYNPKFKGRVTMTADKSTRTAYME |
| | | LSSLRSEDTAVYYCARSYFYGSSSWYFDVWGQGTTVTVSS |
| 802 | DNA VH | CAAGTGCAGCTCGTCCAGTCCGGTGCAGAAGTCAAGAAACC |
| | | CGGTGCTTCAGTGAAAGTGTCCTGCAAGGCCTCCGGTTACA |
| | | CCTTCACCTCCTACAACATGCACTGGGTCCGCCAAGCCCCG |
| | | GGCCAGGGACTCGAATGGATGGGAGCCATCTACCCTGGCAA |
| | | CGGGGACACCTCATACAACCCTAAGTTCAAGGGCAGAGTGA |
| | | CCATGACTGCGGACAAGTCCACTAGAACAGCGTACATGGAG |
| | | CTGAGCAGCCTGCGGTCCGAGGATACTGCCGTGTACTACTG |
| | | CGCCCGCTCCTACTTCTACGGAAGCTCGTCGTGGTACTTCGA |
| | | TGTCTGGGGACAGGGCACCACTGTGACTGTGTCCTCC |
| 803 | LCDR1 | RASSSVSSMH |
| | (Kabat) | |
| 781 | LCDR2 | ATSNLAS |
| | (Kabat) | |
| 804 | LCDR3 | QQWIFNPPT |
| | (Kabat) | |
| 805 | LCDR1 | SSSVSS |
| | (Chothia) | |
| 784 | LCDR2 | ATS |
| | (Chothia) | |
| 806 | LCDR3 | WIFNPP |
| | (Chothia) | |
| 786 | LCDR1 | SSVSS |
| | (IMGT) | |
| 784 | LCDR2 | ATS |
| | (IMGT) | |
| 804 | LCDR3 | QQWIFNPPT |
| | (IMGT) | |
| 803 | LCDR1 | RASSSVSSMH |
| | (Combined) | |
| 781 | LCDR2 | ATSNLAS |
| | (Combined) | |
| 804 | LCDR3 | QQWIFNPPT |
| | (Combined) | |
| 807 | VL | EIVLTQSPATLSLSPGERATLSCRASSSVSSMHWYQQKPGQAPR |
| | | PLIFATSNLASGIPARFSGSGSGTDYTLTISSLEPEDAAVYYCQQ |
| | | WIFNPPTFGGGTKVEIK |
| 808 | DNA VL | GAAATTGTGCTGACTCAGAGCCCCGCCACCCTGAGCTTGTC |
| | | CCCCGGGGAAAGGGCAACGCTGTCATGCCGCGCCTCGTCAT |
| | | CCGTGTCCTCCATGCATTGGTACCAGCAGAAGCCGGGACAG |
| | | GCCCCTCGGCCGCTGATCTTCGCCACCTCCAATCTCGCTTCC |
| | | GGCATTCCGGCCCGGTTCTCGGGAAGCGGGTCGGGGACCGA |
| | | CTATACCCTGACCATCTCTAGCCTTGAACCTGAGGACGCCGC |
| | | GGTGTACTATTGTCAACAGTGGATCTTTAACCCCCCAACCTT |
| | | CGGTGGAGGCACCAAAGTGGAGATTAAG |
| 809 | scFv (VH- | QVQLVQSGAEVKKPGASVKVSCKASGYTFTSYNMHWVRQAP |
| | linker-VL) | GQGLEWMGAIYPGNGDTSYNPKFKGRVTMTADKSTRTAYME |
| | | LSSLRSEDTAVYYCARSYFYGSSSWYFDVWGQGTTVTVSSGG |
| | | GGSGGGGSGGGGSGGGGSEIVLTQSPATLSLSPGERATLSCRAS |
| | | SSVSSMHWYQQKPGQAPRPLIFATSNLASGIPARFSGSGSGTDY |
| | | TLTISSLEPEDAAVYYCQQWIFNPPTFGGGTKVEIK |
| 810 | DNA scFv | Caagtgcagctcgtccagtccggtgcagaagtcaagaaacccggtgcttcagtgaaagtgtcctgc |
| | (VH-linker- | aaggcctccggttacaccttcacctcctacaacatgcactgggtccgccaagccccgggccaggg |
| | VL) | actcgaatggatgggagccatctaccctggcaacggggacacctcatacaaccctaagttcaaggg |
| | | cagagtgaccatgactgcggacaagtccactagaacagcgtacatggagctgagcagcctgcggt |
| | | ccgaggatactgccgtgtactactgcgcccgctcctacttctacggaagctcgtcgtggtacttcgat |
| | | gtctggggacagggcaccactgtgactgtgtcctccggtggcggaggctcgggcggaggcggaa |
| | | gcggcggcgggggatcgggaggaggagggtccgaaattgtgctgactcagagccccgccaccc |
| | | tgagcttgtcccccggggaaagggcaacgctgtcatgccgcgcctcgtcatccgtgtcctccatgc |
| | | attggtaccagcagaagccgggacaggcccctcggccgctgatcttcgccacctccaatctcgctt |
| | | ccggcattccggcccggttctcgggaagcgggtcggggaccgactataccctgaccatctctagcc |
| | | ttgaacctgaggacgccgcggtgtactattgtcaacagtggatctttaaccccccaaccttcggtgga |
| | | ggcaccaaagtggagattaag |
| 811 | Full CAR | MALPVTALLLPLALLLHAARPQVQLVQSGAEVKKPGASVKVS |
| | amino acid | CKASGYTFTSYNMHWVRQAPGQGLEWMGAIYPGNGDTSYNP |
| | sequence | KFKGRVTMTADKSTRTAYMELSSLRSEDTAVYYCARSYFYGS |
| | | SSWYFDVWGQGTTVTVSSGGGGSGGGGSGGGGSGGGGSEIVL |
| | | TQSPATLSLSPGERATLSCRASSSVSSMHWYQQKPGQAPRPLIF |
| | | ATSNLASGIPARFSGSGSGTDYTLTISSLEPEDAAVYYCQQWIF |
| | | NPPTFGGGTKVEIKTTTPAPRPPTPAPTIASQPLSLRPEACRPAA |
| | | GGAVHTRGLDFACDIYIWAPLAGTCGVLLLSLVITLYCKRGRK |
| | | KLLYIFKQPFMRPVQTTQEEDGCSCRFPEEEEGGCELRVKFSRS |
| | | ADAPAYQQGQNQLYNELNLGRREEYDVLDKRRGRDPEMGGK |
| | | PRRKNPQEGLYNELQKDKMAEAYSEIGMKGERRRGKGHDGL |
| | | YQGLSTATKDTYDALHMQALPPR |
| 812 | Full CAR | ATGGCCCTCCCTGTCACCGCCCTGCTGCTTCCGCTGGCTCTT |
| | nucleotide | CTGCTCCACGCCGCTCGGCCCCAAGTGCAGCTCGTCCAGTCC |
| | sequence | GGTGCAGAAGTCAAGAAACCCGGTGCTTCAGTGAAAGTGTC |
| | | CTGCAAGGCCTCCGGTTACACCTTCACCTCCTACAACATGCA |
| | | CTGGGTCCGCCAAGCCCCGGGCCAGGGACTCGAATGGATGG |
| | | GAGCCATCTACCCTGGCAACGGGGACACCTCATACAACCCT |
| | | AAGTTCAAGGGCAGAGTGACCATGACTGCGGACAAGTCCAC |
| | | TAGAACAGCGTACATGGAGCTGAGCAGCCTGCGGTCCGAGG |
| | | ATACTGCCGTGTACTACTGCGCCCGCTCCTACTTCTACGGAA |
| | | GCTCGTCGTGGTACTTCGATGTCTGGGGACAGGGCACCACT |
| | | GTGACTGTGTCCTCCGGTGGCGGAGGCTCGGGCGGAGGCGG |
| | | AAGCGGCGGCGGGGGATCGGGAGGAGGAGGGTCCGAAATT |
| | | GTGCTGACTCAGAGCCCCGCCACCCTGAGCTTGTCCCCCGG |
| | | GGAAAGGGCAACGCTGTCATGCCGCGCCTCGTCATCCGTGT |
| | | CCTCCATGCATTGGTACCAGCAGAAGCCGGGACAGGCCCCT |
| | | CGGCCGCTGATCTTCGCCACCTCCAATCTCGCTTCCGGCATT |
| | | CCGGCCCGGTTCTCGGGAAGCGGGTCGGGGACCGACTATAC |
| | | CCTGACCATCTCTAGCCTTGAACCTGAGGACGCCGCGGTGT |
| | | ACTATTGTCAACAGTGGATCTTTAACCCCCCAACCTTCGGTG |
| | | GAGGCACCAAAGTGGAGATTAAGACCACTACCCCAGCACCG |
| | | AGGCCACCCACCCCGGCTCCTACCATCGCCTCCCAGCCTCTG |
| | | TCCCTGCGTCCGGAGGCATGTAGACCCGCAGCTGGTGGGGC |
| | | CGTGCATACCCGGGGTCTTGACTTCGCCTGCGATATCTACAT |
| | | TTGGGCCCCTCTGGCTGGTACTTGCGGGGTCCTGCTGCTTTC |
| | | ACTCGTGATCACTCTTTACTGTAAGCGCGGTCGGAAGAAGC |
| | | TGCTGTACATCTTTAAGCAACCCTTCATGAGGCCTGTGCAGA |
| | | CTACTCAAGAGGAGGACGGCTGTTCATGCCGGTTCCCAGAG |
| | | GAGGAGGAAGGCGGCTGCGAACTGCGCGTGAAATTCAGCC |
| | | GCAGCGCAGATGCTCCAGCCTACCAGCAGGGGCAGAACCA |
| | | GCTCTACAACGAACTCAATCTTGGTCGGAGAGAGGAGTACG |
| | | ACGTGCTGGACAAGCGGAGAGGACGGGACCCAGAAATGGG |
| | | CGGGAAGCCGCGCAGAAAGAATCCCCAAGAGGGCCTGTAC |
| | | AACGAGCTCCAAAAGGATAAGATGGCAGAAGCCTATAGCG |
| | | AGATTGGTATGAAAGGGGAACGCAGAAGAGGCAAAGGCCA |
| | | CGACGGACTGTACCAGGGACTCAGCACCGCCACCAAGGACA |
| | | CCTATGACGCTCTTCACATGCAGGCCCTGCCGCCTCGG |
| CD20-C3H1 | | |
| 896 | HCDR1 | NYNLH |
| | (Kabat) | |
| 897 | HCDR2 | AIYPGNYDTSYNQKFKG |
| | (Kabat) | |
| 898 | HCDR3 | VDFGHSRYWYFDV |
| | (Kabat) | |
| 899 | HCDR1 | GYTFTNY |
| | (Chothia) | |
| 900 | HCDR2 | YPGNYD |
| | (Chothia) | |
| 901 | HCDR3 | VDFGHSRYWYFDV |
| | (Chothia) | |
| 903 | HCDR1 | GYTFTNYN |
| | (IMGT) | |
| 904 | HCDR2 | IYPGNYDT |
| | (IMGT) | |
| 905 | HCDR3 | ARVDFGHSRYWYFDV |
| | (IMGT) | |
| 906 | HCDR1 | GYTFTNYNLH |
| | (Combined) | |
| 907 | HCDR2 | AIYPGNYDTSYNQKFKG |
| | (Combined) | |
| 908 | HCDR3 | VDFGHSRYWYFDV |
| | (Combined) | |
| 909 | VH | QVQLVQSGAEVKKPGASVKVSCKASGYTFTNYNLHWVRQAP |
| | | GQGLEWMGAIYPGNYDTSYNQKFKGRVTMTADKSTSTAYME |
| | | LSSLRSEDTAVYYCARVDFGHSRYWYFDVWGQGTTVTVSS |
| 910 | LCDR1 | RATSSVSSMN |
| | (Kabat) | |
| 911 | LCDR2 | ATSNLAS |
| | (Kabat) | |
| 912 | LCDR3 | QQWTFNPPT |
| | (Kabat) | |
| 913 | LCDR1 | TSSVSS |
| | (Chothia) | |
| 914 | LCDR2 | ATS |
| | (Chothia) | |
| 915 | LCDR3 | WTFNPP |
| | (Chothia) | |
| 916 | LCDR1 | SSVSS |
| | (IMGT) | |
| 917 | LCDR2 | ATS |
| | (IMGT) | |
| 918 | LCDR3 | QQWTFNPPT |
| | (IMGT) | |
| 919 | LCDR1 | RATSSVSSMN |
| | (Combined) | |
| 920 | LCDR2 | ATSNLAS |
| | (Combined) | |
| 921 | LCDR3 | QQWTFNPPT |
| | (Combined) | |
| 922 | VL | EIVLTQSPATLSLSPGERATLSCRATSSVSSMNWYQQKPGQAPR |
| | | PLIHATSNLASGIPARFSGSGSGTDYTLTISSLEPEDAAVYYCQQ |
| | | WTFNPPTFGQGTKLEIK |
| 923 | scFv (VH- | QVQLVQSGAEVKKPGASVKVSCKASGYTFTNYNLHWVRQAP |
| | linker-VL) | GQGLEWMGAIYPGNYDTSYNQKFKGRVTMTADKSTSTAYME |
| | | LSSLRSEDTAVYYCARVDFGHSRYWYFDVWGQGTTVTVSSGG |
| | | GGSGGGGSGGGGSGGGGSEIVLTQSPATLSLSPGERATLSCRAT |
| | | SSVSSMNWYQQKPGQAPRPLIHATSNLASGIPARFSGSGSGTD |
| | | YTLTISSLEPEDAAVYYCQQWTFNPPTFGQGTKLEIK |
| 924 | Full CAR | MALPVTALLLPLALLLHAARPQVQLVQSGAEVKKPGASVKVS |
| | | CKASGYTFTNYNLHWVRQAPGQGLEWMGAIYPGNYDTSYNQ |
| | | KFKGRVTMTADKSTSTAYMELSSLRSEDTAVYYCARVDFGHS |
| | | RYWYFDVWGQGTTVTVSSGGGGSGGGGSGGGGSGGGGSEIV |
| | | LTQSPATLSLSPGERATLSCRATSSVSSMNWYQQKPGQAPRPLI |
| | | HATSNLASGIPARFSGSGSGTDYTLTISSLEPEDAAVYYCQQWT |
| | | FNPPTFGQGTKLEIKTTTPAPRPPTPAPTIASQPLSLRPEACRPAA |
| | | GGAVHTRGLDFACDIYIWAPLAGTCGVLLLSLVITLYCKRGRK |
| | | KLLYIFKQPFMRPVQTTQEEDGCSCRFPEEEEGGCELRVKFSRS |
| | | ADAPAYQQGQNQLYNELNLGRREEYDVLDKRRGRDPEMGGK |
| | | PRRKNPQEGLYNELQKDKMAEAYSEIGMKGERRRGKGHDGL |
| | | YQGLSTATKDTYDALHMQALPPR |
| CD20-3H3 | | |
| 925 | HCDR1 | NYNLH |
| | (Kabat) | |
| 926 | HCDR2 | AIYPGNYDTSYNQKFKG |
| | (Kabat) | |
| 927 | HCDR3 | VDFGHSRYWYFDV |
| | (Kabat) | |
| 928 | HCDR1 | GYTFTNY |
| | (Chothia) | |
| 929 | HCDR2 | YPGNYD |
| | (Chothia) | |
| 930 | HCDR3 | VDFGHSRYWYFDV |
| | (Chothia) | |
| 931 | HCDR1 | GYTFTNYN |
| | (IMGT) | |
| 932 | HCDR2 | IYPGNYDT |
| | (IMGT) | |
| 933 | HCDR3 | ARVDFGHSRYWYFDV |
| | (IMGT) | |
| 934 | VH | QVQLVQSGAEVKKPGSSVKVSCKASGYTFTNYNLHWVRQAP |
| | | GQGLEWMGAIYPGNYDTSYNQKFKGRVTITADKSTSTAYMEL |
| | | SSLRSEDTAVYYCARVDFGHSRYWYFDVWGQGTTVTVSS |
| 935 | LCDR1 | RATSSVSSMN |
| | (Kabat) | |
| 936 | LCDR2 | ATSNLAS |
| | (Kabat) | |
| 937 | LCDR3 | QQWTFNPPT |
| | (Kabat) | |
| 938 | LCDR1 | TSSVSS |
| | (Chothia) | |
| 939 | LCDR2 | ATS |
| | (Chothia) | |
| 940 | LCDR3 | WTFNPP |
| | (Chothia) | |
| 941 | LCDR1 | SSVSS |
| | (IMGT) | |
| 942 | LCDR2 | ATS |
| | (IMGT) | |
| 943 | LCDR3 | QQWTFNPPT |
| | (IMGT) | |
| 944 | LCDR1 | RATSSVSSMN |
| | (Combined) | |
| 945 | LCDR2 | ATSNLAS |
| | (Combined) | |
| 946 | LCDR3 | QQWTFNPPT |
| | (Combined) | |
| 947 | VL | EIVLTQSPATLSLSPGERATLSCRATSSVSSMNWYQQKPGQAPR |
| | | PLIHATSNLASGIPARFSGSGSGTDYTLTISSLEPEDAAVYYCQQ |
| | | WTFNPPTFGQGTKLEIK |
| 948 | scFv (VH- | QVQLVQSGAEVKKPGSSVKVSCKASGYTFTNYNLHWVRQAP |
| | linker-VL) | GQGLEWMGAIYPGNYDTSYNQKFKGRVTITADKSTSTAYMEL |
| | | SSLRSEDTAVYYCARVDFGHSRYWYFDVWGQGTTVTVSSGG |
| | | GGSGGGGSGGGGSGGGGSEIVLTQSPATLSLSPGERATLSCRAT |
| | | SSVSSMNWYQQKPGQAPRPLIHATSNLASGIPARFSGSGSGTD |
| | | YTLTISSLEPEDAAVYYCQQWTFNPPTFGQGTKLEIK |
| 949 | Full CAR | MALPVTALLLPLALLLHAARPQVQLVQSGAEVKKPGSSVKVS |
| | | CKASGYTFTNYNLHWVRQAPGQGLEWMGAIYPGNYDTSYNQ |
| | | KFKGRVTITADKSTSTAYMELSSLRSEDTAVYYCARVDFGHSR |
| | | YWYFDVWGQGTTVTVSSGGGGSGGGGSGGGGSGGGGSEIVL |
| | | TQSPATLSLSPGERATLSCRATSSVSSMNWYQQKPGQAPRPLIH |
| | | ATSNLASGIPARFSGSGSGTDYTLTISSLEPEDAAVYYCQQWTF |
| | | NPPTFGQGTKLEIKTTTPAPRPPTPAPTIASQPLSLRPEACRPAA |
| | | GGAVHTRGLDFACDIYIWAPLAGTCGVLLLSLVITLYCKRGRK |
| | | KLLYIFKQPFMRPVQTTQEEDGCSCRFPEEEEGGCELRVKFSRS |
| | | ADAPAYQQGQNQLYNELNLGRREEYDVLDKRRGRDPEMGGK |
| | | PRRKNPQEGLYNELQKDKMAEAYSEIGMKGERRRGKGHDGL |
| | | YQGLSTATKDTYDALHMQALPPR |
| CD20-C3H4 | | |
| 950 | HCDR1 | NYNLH |
| | (Kabat) | |
| 951 | HCDR2 | AIYPGNYDTSYNQKFKG |
| | (Kabat) | |
| 952 | HCDR3 | VDFGHSRYWYFDV |
| | (Kabat) | |
| 953 | HCDR1 | GYTFTNY |
| | (Chothia) | |
| 954 | HCDR2 | YPGNYD |
| | (Chothia) | |
| 955 | HCDR3 | VDFGHSRYWYFDV |
| | (Chothia) | |
| 956 | HCDR1 | GYTFTNYN |
| | (IMGT) | |
| 957 | HCDR2 | IYPGNYDT |
| | (IMGT) | |
| 958 | HCDR3 | ARVDFGHSRYWYFDV |
| | (IMGT) | |
| 959 | HCDR1 | GYTFTNYNLH |
| | (Combined) | |
| 960 | HCDR2 | AIYPGNYDTSYNQKFKG |
| | (Combined) | |
| 961 | HCDR3 | VDFGHSRYWYFDV |
| | (Combined) | |
| 962 | VH | QVQLVQSGAEVKKPGSSVKVSCKASGYTFTNYNLHWVRQAP |
| | | GQGLEWMGAIYPGNYDTSYNQKFKGRVTITADKSTSTAYMEL |
| | | SSLRSEDTAVYYCARVDFGHSRYWYFDVWGQGTTVTVSS |
| 963 | LCDR1 | RATSSVSSMN |
| | (Kabat) | |
| 964 | LCDR2 | ATSNLAS |
| | (Kabat) | |
| 965 | LCDR3 | QQWTFNPPT |
| | (Kabat) | |
| 966 | LCDR1 | TSSVSS |
| | (Chothia) | |
| 967 | LCDR2 | ATS |
| | (Chothia) | |
| 968 | LCDR3 | WTFNPP |
| | (Chothia) | |
| 969 | LCDR1 | SSVSS |
| | (IMGT) | |
| 970 | LCDR2 | ATS |
| | (IMGT) | |
| 971 | LCDR3 | QQWTFNPPT |
| | (IMGT) | |
| 972 | LCDR1 | RATSSVSSMN |
| | (Combined) | |
| 973 | LCDR2 | ATSNLAS |
| | (Combined) | |
| 974 | LCDR3 | QQWTFNPPT |
| | (Combined) | |
| 975 | VL | DIQLTQSPSFLSASVGDRVTITCRATSSVSSMNWYQQKPGKAP |
| | | KPLIHATSNLASGVPSRFSGSGSGTEYTLTISSLQPEDFATYYCQ |
| | | QWTFNPPTFGQGTKLEIK |
| 976 | scFv (VH- | QVQLVQSGAEVKKPGSSVKVSCKASGYTFTNYNLHWVRQAP |
| | linker-VL) | GQGLEWMGAIYPGNYDTSYNQKFKGRVTITADKSTSTAYMEL |
| | | SSLRSEDTAVYYCARVDFGHSRYWYFDVWGQGTTVTVSSGG |
| | | GGSGGGGSGGGGSGGGGSDIQLTQSPSFLSASVGDRVTITCRA |
| | | TSSVSSMNWYQQKPGKAPKPLIHATSNLASGVPSRFSGSGSGT |
| | | EYTLTISSLQPEDFATYYCQQWTFNPPTFGQGTKLEIK |
| 977 | Full CAR | MALPVTALLLPLALLLHAARPQVQLVQSGAEVKKPGSSVKVS |
| | | CKASGYTFTNYNLHWVRQAPGQGLEWMGAIYPGNYDTSYNQ |
| | | KFKGRVTITADKSTSTAYMELSSLRSEDTAVYYCARVDFGHSR |
| | | YWYFDVWGQGTTVTVSSGGGGSGGGGSGGGGSGGGGSDIQL |
| | | TQSPSFLSASVGDRVTITCRATSSVSSMNWYQQKPGKAPKPLIH |
| | | ATSNLASGVPSRFSGSGSGTEYTLTISSLQPEDFATYYCQQWTF |
| | | NPPTFGQGTKLEIKTTTPAPRPPTPAPTIASQPLSLRPEACRPAA |
| | | GGAVHTRGLDFACDIYIWAPLAGTCGVLLLSLVITLYCKRGRK |
| | | KLLYIFKQPFMRPVQTTQEEDGCSCRFPEEEEGGCELRVKFSRS |
| | | ADAPAYQQGQNQLYNELNLGRREEYDVLDKRRGRDPEMGGK |
| | | PRRKNPQEGLYNELQKDKMAEAYSEIGMKGERRRGKGHDGL |
| | | YQGLSTATKDTYDALHMQALPPR |
| CD20-C2H1 | | |
| 978 | HCDR1 | NYWMH |
| | (Kabat) | |
| 979 | HCDR2 | FITPTTGYPEYNQKFKD |
| | (Kabat) | |
| 980 | HCDR3 | RKVGKGVYYALDY |
| | (Kabat) | |
| 981 | HCDR1 | GYTFTNY |
| | (Chothia) | |
| 982 | HCDR2 | TPTTGY |
| | (Chothia) | |
| 983 | HCDR3 | RKVGKGVYYALDY |
| | (Chothia) | |
| 984 | HCDR1 | GYTFTNYW |
| | (IMGT) | |
| 985 | HCDR2 | ITPTTGYP |
| | (IMGT) | |
| 986 | HCDR3 | ARRKVGKGVYYALDY |
| | (IMGT) | |
| 987 | HCDR1 | GYTFTNYWMH |
| | (Combined) | |
| 988 | HCDR2 | FITPTTGYPEYNQKFKD |
| | (Combined) | |
| 989 | HCDR3 | RKVGKGVYYALDY |
| | (Combined) | |
| 990 | VH | QVQLVQSGAEVKKPGASVKVSCKASGYTFTNYWMHWVRQA |
| | | PGQGLEWMGFITPTTGYPEYNQKFKDRVTMTADKSTSTAYME |
| | | LSSLRSEDTAVYYCARRKVGKGVYYALDYWGQGTTVTVSS |
| 991 | LCDR1 | RASGNIHNYLA |
| | (Kabat) | |
| 992 | LCDR2 | NTKTLAD |
| | (Kabat) | |
| 993 | LCDR3 | QHFWSSPWT |
| | (Kabat) | |
| 994 | LCDR1 | SGNIHNY |
| | (Chothia) | |
| 995 | LCDR2 | NTK |
| | (Chothia) | |
| 996 | LCDR3 | FWSSPW |
| | (Chothia) | |
| 997 | LCDR1 | GNIHNY |
| | (IMGT) | |
| 998 | LCDR2 | NTK |
| | (IMGT) | |
| 999 | LCDR3 | QHFWSSPWT |
| | (IMGT) | |
| 1000 | LCDR1 | RASGNIHNYLA |
| | (Combined) | |
| 1001 | LCDR2 | NTKTLAD |
| | (Combined) | |
| 1002 | LCDR3 | QHFWSSPWT |
| | (Combined) | |
| 1003 | VL | DIQMTQSPSSLSASVGDRVTITCRASGNIHNYLAWYQQKPGKV |
| | | PKLLIYNTKTLADGVPSRFSGSGSGTDYTLTISSLQPEDVATYY |
| | | CQHFWSSPWTFGGGTKVEIK |
| 1004 | scFv (VH- | QVQLVQSGAEVKKPGASVKVSCKASGYTFTNYWMHWVRQA |
| | linker-VL) | PGQGLEWMGFITPTTGYPEYNQKFKDRVTMTADKSTSTAYME |
| | | LSSLRSEDTAVYYCARRKVGKGVYYALDYWGQGTTVTVSSG |
| | | GGGSGGGGSGGGGSGGGGSDIQMTQSPSSLSASVGDRVTITCR |
| | | ASGNIHNYLAWYQQKPGKVPKLLIYNTKTLADGVPSRFSGSGS |
| | | GTDYTLTISSLQPEDVATYYCQHFWSSPWTFGGGTKVEIK |
| 1005 | Full CAR | MALPVTALLLPLALLLHAARPQVQLVQSGAEVKKPGASVKVS |
| | | CKASGYTFTNYWMHWVRQAPGQGLEWMGFITPTTGYPEYNQ |
| | | KFKDRVTMTADKSTSTAYMELSSLRSEDTAVYYCARRKVGKG |
| | | VYYALDYWGQGTTVTVSSGGGGSGGGGSGGGGSGGGGSDIQ |
| | | MTQSPSSLSASVGDRVTITCRASGNIHNYLAWYQQKPGKVPKL |
| | | LIYNTKTLADGVPSRFSGSGSGTDYTLTISSLQPEDVATYYCQH |
| | | FWSSPWTFGGGTKVEIKTTTPAPRPPTPAPTIASQPLSLRPEACR |
| | | PAAGGAVHTRGLDFACDIYIWAPLAGTCGVLLLSLVITLYCKR |
| | | GRKKLLYIFKQPFMRPVQTTQEEDGCSCRFPEEEEGGCELRVK |
| | | FSRSADAPAYQQGQNQLYNELNLGRREEYDVLDKRRGRDPEM |
| | | GGKPRRKNPQEGLYNELQKDKMAEAYSEIGMKGERRRGKGH |
| | | DGLYQGLSTATKDTYDALHMQALPPR |
| CD20-C2H2 | | |
| 1006 | HCDR1 | NYWMH |
| | (Kabat) | |
| 1007 | HCDR2 | FITPTTGYPEYNQKFKD |
| | (Kabat) | |
| 1008 | HCDR3 | RKVGKGVYYALDY |
| | (Kabat) | |
| 1009 | HCDR1 | GYTFTNY |
| | (Chothia) | |
| 1010 | HCDR2 | TPTTGY |
| | (Chothia) | |
| 1011 | HCDR3 | RKVGKGVYYALDY |
| | (Chothia) | |
| 1012 | HCDR1 | GYTFTNYW |
| | (IMGT) | |
| 1013 | HCDR2 | ITPTTGYP |
| | (IMGT) | |
| 1014 | HCDR3 | ARRKVGKGVYYALDY |
| | (IMGT) | |
| 1015 | HCDR1 | GYTFTNYWMH |
| | (Combined) | |
| 1016 | HCDR2 | FITPTTGYPEYNQKFKD |
| | (Combined) | |
| 1017 | HCDR3 | RKVGKGVYYALDY |
| | (Combined) | |
| 1018 | VH | QVQLVQSGAEVKKPGSSVKVSCKASGYTFTNYWMHWVRQAP |
| | | GQGLEWMGFITPTTGYPEYNQKFKDRVTITADKSTSTAYMELS |
| | | SLRSEDTAVYYCARRKVGKGVYYALDYWGQGTTVTVSS |
| 1019 | LCDR1 | RASGNIHNYLA |
| | (Kabat) | |
| 1020 | LCDR2 | NTKTLAD |
| | (Kabat) | |
| 1021 | LCDR3 | QHFWSSPWT |
| | (Kabat) | |
| 1022 | LCDR1 | SGNIHNY |
| | (Chothia) | |
| 1023 | LCDR2 | NTK |
| | (Chothia) | |
| 1024 | LCDR3 | FWSSPW |
| | (Chothia) | |
| 1025 | LCDR1 | GNIHNY |
| | (IMGT) | |
| 1026 | LCDR2 | NTK |
| | (IMGT) | |
| 1027 | LCDR3 | QHFWSSPWT |
| | (IMGT) | |
| 1028 | LCDR1 | RASGNIHNYLA |
| | (Combined) | |
| 1029 | LCDR2 | NTKTLAD |
| | (Combined) | |
| 1030 | LCDR3 | QHFWSSPWT |
| | (Combined) | |
| 1031 | VL | DIQMTQSPSSLSASVGDRVTITCRASGNIHNYLAWYQQKPGKV |
| | | PKLLIYNTKTLADGVPSRFSGSGSGTDYTLTISSLQPEDVATYY |
| | | CQHFWSSPWTFGGGTKVEIK |
| 1032 | scFv (VH- | QVQLVQSGAEVKKPGSSVKVSCKASGYTFTNYWMHWVRQAP |
| | linker-VL) | GQGLEWMGFITPTTGYPEYNQKFKDRVTITADKSTSTAYMELS |
| | | SLRSEDTAVYYCARRKVGKGVYYALDYWGQGTTVTVSSGGG |
| | | GSGGGGSGGGGSGGGGSDIQMTQSPSSLSASVGDRVTITCRAS |
| | | GNIHNYLAWYQQKPGKVPKLLIYNTKTLADGVPSRFSGSGSGT |
| | | DYTLTISSLQPEDVATYYCQHFWSSPWTFGGGTKVEIK |
| 1033 | Full CAR | MALPVTALLLPLALLLHAARPQVQLVQSGAEVKKPGSSVKVS |
| | | CKASGYTFTNYWMHWVRQAPGQGLEWMGFITPTTGYPEYNQ |
| | | KFKDRVTITADKSTSTAYMELSSLRSEDTAVYYCARRKVGKG |
| | | VYYALDYWGQGTTVTVSSGGGGSGGGGSGGGGSGGGGSDIQ |
| | | MTQSPSSLSASVGDRVTITCRASGNIHNYLAWYQQKPGKVPKL |
| | | LIYNTKTLADGVPSRFSGSGSGTDYTLTISSLQPEDVATYYCQH |
| | | FWSSPWTFGGGTKVEIKTTTPAPRPPTPAPTIASQPLSLRPEACR |
| | | PAAGGAVHTRGLDFACDIYIWAPLAGTCGVLLLSLVITLYCKR |
| | | GRKKLLYIFKQPFMRPVQTTQEEDGCSCRFPEEEEGGCELRVK |
| | | FSRSADAPAYQQGQNQLYNELNLGRREEYDVLDKRRGRDPEM |
| | | GGKPRRKNPQEGLYNELQKDKMAEAYSEIGMKGERRRGKGH |
| | | DGLYQGLSTATKDTYDALHMQALPPR |
| CD20-C2H3 | | |
| 1034 | HCDR1 | NYWMH |
| | (Kabat) | |
| 1035 | HCDR2 | FITPTTGYPEYNQKFKD |
| | (Kabat) | |
| 1036 | HCDR3 | RKVGKGVYYALDY |
| | (Kabat) | |
| 1037 | HCDR1 | GYTFTNY |
| | (Chothia) | |
| 1038 | HCDR2 | TPTTGY |
| | (Chothia) | |
| 1039 | HCDR3 | RKVGKGVYYALDY |
| | (Chothia) | |
| 1040 | HCDR1 | GYTFTNYW |
| | (IMGT) | |
| 1041 | HCDR2 | ITPTTGYP |
| | (IMGT) | |
| 1042 | HCDR3 | ARRKVGKGVYYALDY |
| | (IMGT) | |
| 1043 | HCDR1 | GYTFTNYWMH |
| | (Combined) | |
| 1044 | HCDR2 | FITPTTGYPEYNQKFKD |
| | (Combined) | |
| 1045 | HCDR3 | RKVGKGVYYALDY |
| | (Combined) | |
| 1046 | VH | QVQLVQSGAEVKKPGASVKVSCKASGYTFTNYWMHWVRQA |
| | | PGQGLEWMGFITPTTGYPEYNQKFKDRVTMTADKSTSTAYME |
| | | LSSLRSEDTAVYYCARRKVGKGVYYALDYWGQGTTVTVSS |
| 1047 | LCDR1 | RASGNIHNYLA |
| | (Kabat) | |
| 1048 | LCDR2 | NTKTLAD |
| | (Kabat) | |
| 1049 | LCDR3 | QHFWSSPWT |
| | (Kabat) | |
| 1050 | LCDR1 | SGNIHNY |
| | (Chothia) | |
| 1051 | LCDR2 | NTK |
| | (Chothia) | |
| 1052 | LCDR3 | FWSSPW |
| | (Chothia) | |
| 1053 | LCDR1 | GNIHNY |
| | (IMGT) | |
| 1054 | LCDR2 | NTK |
| | (IMGT) | |
| 1055 | LCDR3 | QHFWSSPWT |
| | (IMGT) | |
| 1056 | LCDR1 | RASGNIHNYLA |
| | (Combined) | |
| 1057 | LCDR2 | NTKTLAD |
| | (Combined) | |
| 1058 | LCDR3 | QHFWSSPWT |
| | (Combined) | |
| 1059 | VL | AIRMTQSPFSLSASVGDRVTITCRASGNIHNYLAWYQQKPAKA |
| | | PKLFIYNTKTLADGVPSRFSGSGSGTDYTLTISSLQPEDFATYYC |
| | | QHFWSSPWTFGGGTKVEIK |
| 1060 | scFv (VH- | QVQLVQSGAEVKKPGASVKVSCKASGYTFTNYWMHWVRQA |
| | linker-VL) | PGQGLEWMGFITPTTGYPEYNQKFKDRVTMTADKSTSTAYME |
| | | LSSLRSEDTAVYYCARRKVGKGVYYALDYWGQGTTVTVSSG |
| | | GGGSGGGGSGGGGSGGGGSAIRMTQSPFSLSASVGDRVTITCR |
| | | ASGNIHNYLAWYQQKPAKAPKLFIYNTKTLADGVPSRFSGSGS |
| | | GTDYTLTISSLQPEDFATYYCQHFWSSPWTFGGGTKVEIK |
| 1061 | Full CAR | MALPVTALLLPLALLLHAARPQVQLVQSGAEVKKPGASVKVS |
| | | CKASGYTFTNYWMHWVRQAPGQGLEWMGFITPTTGYPEYNQ |
| | | KFKDRVTMTADKSTSTAYMELSSLRSEDTAVYYCARRKVGKG |
| | | VYYALDYWGQGTTVTVSSGGGGSGGGGSGGGGSGGGGSAIR |
| | | MTQSPFSLSASVGDRVTITCRASGNIHNYLAWYQQKPAKAPKL |
| | | FIYNTKTLADGVPSRFSGSGSGTDYTLTISSLQPEDFATYYCQH |
| | | FWSSPWTFGGGTKVEIKTTTPAPRPPTPAPTIASQPLSLRPEACR |
| | | PAAGGAVHTRGLDFACDIYIWAPLAGTCGVLLLSLVITLYCKR |
| | | GRKKLLYIFKQPFMRPVQTTQEEDGCSCRFPEEEEGGCELRVK |
| | | FSRSADAPAYQQGQNQLYNELNLGRREEYDVLDKRRGRDPEM |
| | | GGKPRRKNPQEGLYNELQKDKMAEAYSEIGMKGERRRGKGH |
| | | DGLYQGLSTATKDTYDALHMQALPPR |
| CD20-C2H4 | | |
| 1062 | HCDR1 | NYWMH |
| | (Kabat) | |
| 1063 | HCDR2 | FITPTTGYPEYNQKFKD |
| | (Kabat) | |
| 1064 | HCDR3 | RKVGKGVYYALDY |
| | (Kabat) | |
| 1065 | HCDR1 | GYTFTNY |
| | (Chothia) | |
| 1066 | HCDR2 | TPTTGY |
| | (Chothia) | |
| 1067 | HCDR3 | RKVGKGVYYALDY |
| | (Chothia) | |
| 1068 | HCDR1 | GYTFTNYW |
| | (IMGT | |
| 1069 | HCDR2 | ITPTTGYP |
| | (IMGT) | |
| 1070 | HCDR3 | ARRKVGKGVYYALDY |
| | (IMGT) | |
| 1071 | HCDR1 | GYTFTNYWMH |
| | (Combined) | |
| 1072 | HCDR2 | FITPTTGYPEYNQKFKD |
| | (Combined) | |
| 1073 | HCDR3 | RKVGKGVYYALDY |
| | (Combined) | |
| 1074 | VH | QVQLVQSGAEVKKPGSSVKVSCKASGYTFTNYWMHWVRQAP |
| | | GQGLEWMGFITPTTGYPEYNQKFKDRVTITADKSTSTAYMELS |
| | | SLRSEDTAVYYCARRKVGKGVYYALDYWGQGTTVTVSS |
| 1075 | LCDR1 | RASGNIHNYLA |
| | (Kabat) | |
| 1076 | LCDR2 | NTKTLAD |
| | (Kabat) | |
| 1077 | LCDR3 | QHFWSSPWT |
| | (Kabat) | |
| 1078 | LCDR1 | SGNIHNY |
| | (Chothia) | |
| 1079 | LCDR2 | NTK |
| | (Chothia) | |
| 1080 | LCDR3 | FWSSPW |
| | (Chothia) | |
| 1081 | LCDR1 | GNIHNY |
| | (IMGT) | |
| 1082 | LCDR2 | NTK |
| | (IMGT) | |
| 1083 | LCDR3 | QHFWSSPWT |
| | (IMGT) | |
| 1084 | LCDR1 | RASGNIHNYLA |
| | (Combined) | |
| 1085 | LCDR2 | NTKTLAD |
| | (Combined) | |
| 1086 | LCDR3 | QHFWSSPWT |
| | (Combined) | |
| 1087 | VL | AIRMTQSPFSLSASVGDRVTITCRASGNIHNYLAWYQQKPAKA |
| | | PKLFIYNTKTLADGVPSRFSGSGSGTDYTLTISSLQPEDFATYYC |
| | | QHFWSSPWTFGGGTKVEIK |
| 1088 | scFv (VH- | QVQLVQSGAEVKKPGSSVKVSCKASGYTFTNYWMHWVRQAP |
| | linker-VL) | GQGLEWMGFITPTTGYPEYNQKFKDRVTITADKSTSTAYMELS |
| | | SLRSEDTAVYYCARRKVGKGVYYALDYWGQGTTVTVSSGGG |
| | | GSGGGGSGGGGSGGGGSAIRMTQSPFSLSASVGDRVTITCRAS |
| | | GNIHNYLAWYQQKPAKAPKLFIYNTKTLADGVPSRFSGSGSGT |
| | | DYTLTISSLQPEDFATYYCQHFWSSPWTFGGGTKVEIK |
| 1089 | Full CAR | MALPVTALLLPLALLLHAARPQVQLVQSGAEVKKPGSSVKVS |
| | | CKASGYTFTNYWMHWVRQAPGQGLEWMGFITPTTGYPEYNQ |
| | | KFKDRVTITADKSTSTAYMELSSLRSEDTAVYYCARRKVGKG |
| | | VYYALDYWGQGTTVTVSSGGGGSGGGGSGGGGSGGGGSAIR |
| | | MTQSPFSLSASVGDRVTITCRASGNIHNYLAWYQQKPAKAPKL |
| | | FIYNTKTLADGVPSRFSGSGSGTDYTLTISSLQPEDFATYYCQH |
| | | FWSSPWTFGGGTKVEIKTTTPAPRPPTPAPTIASQPLSLRPEACR |
| | | PAAGGAVHTRGLDFACDIYIWAPLAGTCGVLLLSLVITLYCKR |
| | | GRKKLLYIFKQPFMRPVQTTQEEDGCSCRFPEEEEGGCELRVK |
| | | FSRSADAPAYQQGQNQLYNELNLGRREEYDVLDKRRGRDPEM |
| | | GGKPRRKNPQEGLYNELQKDKMAEAYSEIGMKGERRRGKGH |
| | | DGLYQGLSTATKDTYDALHMQALPPR |
| CD20-C5H2 | | |
| 1090 | HCDR1 | SYNMH |
| | (Kabat) | |
| 1091 | HCDR2 | AIYPGNGDTSYNPKFKG |
| | (Kabat) | |
| 1092 | HCDR3 | SYFYGSSSWYFDV |
| | (Kabat) | |
| 1093 | HCDR1 | GYTFTSY |
| | (Chothia) | |
| 1094 | HCDR2 | YPGNGD |
| | (Chothia) | |
| 1095 | HCDR3 | SYFYGSSSWYFDV |
| | (Chothia) | |
| 1096 | HCDR1 | GYTFTSYN |
| | (IMGT) | |
| 1097 | HCDR2 | TYPGNGDT |
| | (IMGT) | |
| 1098 | HCDR3 | ARSYFYGSSSWYFDV |
| | (IMGT) | |
| 1099 | HCDR1 | GYTFTSYNMH |
| | (Combined) | |
| 1100 | HCDR2 | AIYPGNGDTSYNPKFKG |
| | (Combined) | |
| 1101 | HCDR3 | SYFYGSSSWYFDV |
| | (Combined) | |
| 1102 | VH | QVQLVQSGAEVKKPGASVKVSCKASGYTFTSYNMHWVRQAP |
| | | GQGLEWMGAIYPGNGDTSYNPKFKGRVTMTADKSTRTAYME |
| | | LSSLRSEDTAVYYCARSYFYGSSSWYFDVWGQGTTVTVSS |
| 1103 | LCDR1 | RASSSVSSMH |
| | (Kabat) | |
| 1104 | LCDR2 | ATSNLAS |
| | (Kabat) | |
| 1105 | LCDR3 | QQWIFNPPT |
| | (Kabat) | |
| 1106 | LCDR1 | SSSVSS |
| | (Chothia) | |
| 1107 | LCDR2 | ATS |
| | (Chothia) | |
| 1108 | LCDR3 | WIFNPP |
| | (Chothia) | |
| 1109 | LCDR1 | SSVSS |
| | (IMGT) | |
| 1110 | LCDR2 | ATS |
| | (IMGT) | |
| 1111 | LCDR3 | QQWIFNPPT |
| | (IMGT) | |
| 1112 | LCDR1 | RASSSVSSMH |
| | (Combined) | |
| 1113 | LCDR2 | ATSNLAS |
| | (Combined) | |
| 1114 | LCDR3 | QQWIFNPPT |
| | (Combined) | |
| 1115 | VL | DIQLTQSPSFLSASVGDRVTITCRASSSVSSMHWYQQKPGKAP |
| | | KPLIFATSNLASGVPSRFSGSGSGTEYTLTISSLQPEDFATYYCQ |
| | | QWIFNPPTFGGGTKVEIK |
| 1116 | scFv (VH- | QVQLVQSGAEVKKPGASVKVSCKASGYTFTSYNMHWVRQAP |
| | linker-VL) | GQGLEWMGAIYPGNGDTSYNPKFKGRVTMTADKSTRTAYME |
| | | LSSLRSEDTAVYYCARSYFYGSSSWYFDVWGQGTTVTVSSGG |
| | | GGSGGGGSGGGGSGGGGSDIQLTQSPSFLSASVGDRVTITCRAS |
| | | SSVSSMHWYQQKPGKAPKPLIFATSNLASGVPSRFSGSGSGTE |
| | | YTLTISSLQPEDFATYYCQQWIFNPPTFGGGTKVEIK |
| 1117 | Full CAR | MALPVTALLLPLALLLHAARPQVQLVQSGAEVKKPGASVKVS |
| | | CKASGYTFTSYNMHWVRQAPGQGLEWMGAIYPGNGDTSYNP |
| | | KFKGRVTMTADKSTRTAYMELSSLRSEDTAVYYCARSYFYGS |
| | | SSWYFDVWGQGTTVTVSSGGGGSGGGGSGGGGSGGGGSDIQL |
| | | TQSPSFLSASVGDRVTITCRASSSVSSMHWYQQKPGKAPKPLIF |
| | | ATSNLASGVPSRFSGSGSGTEYTLTISSLQPEDFATYYCQQWIF |
| | | NPPTFGGGTKVEIKTTTPAPRPPTPAPTIASQPLSLRPEACRPAA |
| | | GGAVHTRGLDFACDIYIWAPLAGTCGVLLLSLVITLYCKRGRK |
| | | KLLYIFKQPFMRPVQTTQEEDGCSCRFPEEEEGGCELRVKFSRS |
| | | ADAPAYQQGQNQLYNELNLGRREEYDVLDKRRGRDPEMGGK |
| | | PRRKNPQEGLYNELQKDKMAEAYSEIGMKGERRRGKGHDGL |
| | | YQGLSTATKDTYDALHMQALPPR |
| CD20-C5H3 | | |
| 1118 | HCDR1 | SYNMH |
| | (Kabat) | |
| 1119 | HCDR2 | AIYPGNGDTSYNPKFKG |
| | (Kabat) | |
| 1120 | HCDR3 | SYFYGSSSWYFDV |
| | (Kabat) | |
| 1121 | HCDR1 | GYTFTSY |
| | (Chothia) | |
| 1122 | HCDR2 | YPGNGD |
| | (Chothia) | |
| 1123 | HCDR3 | SYFYGSSSWYFDV |
| | (Chothia) | |
| 1124 | HCDR1 | GYTFTSYN |
| | (IMGT) | |
| 1125 | HCDR2 | IYPGNGDT |
| | (IMGT) | |
| 1126 | HCDR3 | ARSYFYGSSSWYFDV |
| | (IMGT) | |
| 1127 | HCDR1 | GYTFTSYNMH |
| | (Combined) | |
| 1128 | HCDR2 | AIYPGNGDTSYNPKFKG |
| | (Combined) | |
| 1129 | HCDR3 | SYFYGSSSWYFDV |
| | (Combined) | |
| 1130 | VH | QVQLVQSGAEVKKPGSSVKVSCKASGYTFTSYNMHWVRQAP |
| | | GQGLEWMGAIYPGNGDTSYNPKFKGRVTITADKSTRTAYMEL |
| | | SSLRSEDTAVYYCARSYFYGSSSWYFDVWGQGTTVTVSS |
| 1131 | LCDR1 | RASSSVSSMH |
| | (Kabat) | |
| 1132 | LCDR2 | ATSNLAS |
| | (Kabat) | |
| 1133 | LCDR3 | QQWIFNPPT |
| | (Kabat) | |
| 1134 | LCDR1 | SSSVSS |
| | (Chothia) | |
| 1135 | LCDR2 | ATS |
| | (Chothia) | |
| 1136 | LCDR3 | WIFNPP |
| | (Chothia) | |
| 1137 | LCDR1 | SSVSS |
| | (IMGT) | |
| 1138 | LCDR2 | ATS |
| | (IMGT) | |
| 1139 | LCDR3 | QQWIFNPPT |
| | (IMGT) | |
| 1140 | LCDR1 | RASSSVSSMH |
| | (Combined) | |
| 1141 | LCDR2 | ATSNLAS |
| | (Combined) | |
| 1142 | LCDR3 | QQWIFNPPT |
| | (Combined) | |
| 1143 | VL | EIVLTQSPATLSLSPGERATLSCRASSSVSSMHWYQQKPGQAPR |
| | | PLIFATSNLASGIPARFSGSGSGTDYTLTISSLEPEDAAVYYCQQ |
| | | WIFNPPTFGGGTKVEIK |
| 1144 | scFv (VH- | QVQLVQSGAEVKKPGSSVKVSCKASGYTFTSYNMHWVRQAP |
| | linker-VL) | GQGLEWMGAIYPGNGDTSYNPKFKGRVTITADKSTRTAYMEL |
| | | SSLRSEDTAVYYCARSYFYGSSSWYFDVWGQGTTVTVSSGGG |
| | | GSGGGGSGGGGSGGGGSEIVLTQSPATLSLSPGERATLSCRASS |
| | | SVSSMHWYQQKPGQAPRPLIFATSNLASGIPARFSGSGSGTDYT |
| | | LTISSLEPEDAAVYYCQQWIFNPPTFGGGTKVEIK |
| 1145 | Full CAR | MALPVTALLLPLALLLHAARPQVQLVQSGAEVKKPGSSVKVS |
| | | CKASGYTFTSYNMHWVRQAPGQGLEWMGAIYPGNGDTSYNP |
| | | KFKGRVTITADKSTRTAYMELSSLRSEDTAVYYCARSYFYGSS |
| | | SWYFDVWGQGTTVTVSSGGGGSGGGGSGGGGSGGGGSEIVLT |
| | | QSPATLSLSPGERATLSCRASSSVSSMHWYQQKPGQAPRPLIFA |
| | | TSNLASGIPARFSGSGSGTDYTLTISSLEPEDAAVYYCQQWIFNP |
| | | PTFGGGTKVEIKTTTPAPRPPTPAPTIASQPLSLRPEACRPAAGG |
| | | AVHTRGLDFACDIYIWAPLAGTCGVLLLSLVITLYCKRGRKKL |
| | | LYIFKQPFMRPVQTTQEEDGCSCRFPEEEEGGCELRVKFSRSAD |
| | | APAYQQGQNQLYNELNLGRREEYDVLDKRRGRDPEMGGKPR |
| | | RKNPQEGLYNELQKDKMAEAYSEIGMKGERRRGKGHDGLYQ |
| | | GLSTATKDTYDALHMQALPPR |
| CD20-C5H4 | | |
| 1146 | HCDR1 | SYNMH |
| | (Kabat) | |
| 1147 | HCDR2 | AIYPGNGDTSYNPKFKG |
| | (Kabat) | |
| 1148 | HCDR3 | SYFYGSSSWYFDV |
| | (Kabat) | |
| 1149 | HCDR1 | GYTFTSY |
| | (Chothia) | |
| 1150 | HCDR2 | YPGNGD |
| | (Chothia) | |
| 1151 | HCDR3 | SYFYGSSSWYFDV |
| | (Chothia) | |
| 1152 | HCDR1 | GYTFTSYN |
| | (IMGT) | |
| 1153 | HCDR2 | IYPGNGDT |
| | (IMGT) | |
| 1154 | HCDR3 | ARSYFYGSSSWYFDV |
| | (IMGT) | |
| 1155 | HCDR1 | GYTFTSYNMH |
| | (Combined) | |
| 1156 | HCDR2 | AIYPGNGDTSYNPKFKG |
| | (Combined) | |
| 1157 | HCDR3 | SYFYGSSSWYFDV |
| | (Combined) | |
| 1158 | VH | QVQLVQSGAEVKKPGSSVKVSCKASGYTFTSYNMHWVRQAP |
| | | GQGLEWMGAIYPGNGDTSYNPKFKGRVTITADKSTRTAYMEL |
| | | SSLRSEDTAVYYCARSYFYGSSSWYFDVWGQGTTVTVSS |
| 1159 | LCDR1 | RASSSVSSMH |
| | (Kabat) | |
| 1160 | LCDR2 | ATSNLAS |
| | (Kabat) | |
| 1161 | LCDR3 | QQWIFNPPT |
| | (Kabat) | |
| 1162 | LCDR1 | SSSVSS |
| | (Chothia) | |
| 1163 | LCDR2 | ATS |
| | (Chothia) | |
| 1164 | LCDR3 | WIFNPP |
| | (Chothia) | |
| 1165 | LCDR1 | SSVSS |
| | (IMGT) | |
| 1166 | LCDR2 | ATS |
| | (IMGT) | |
| 1167 | LCDR3 | QQWIFNPPT |
| | (IMGT) | |
| 1168 | LCDR1 | RASSSVSSMH |
| | (Combined) | |
| 1169 | LCDR2 | ATSNLAS |
| | (Combined) | |
| 1170 | LCDR3 | QQWIFNPPT |
| | (Combined) | |
| 1171 | VL | DIQLTQSPSFLSASVGDRVTITCRASSSVSSMHWYQQKPGKAP |
| | | KPLIFATSNLASGVPSRFSGSGSGTEYTLTISSLQPEDFATYYCQ |
| | | QWIFNPPTFGGGTKVEIK |
| 1172 | scFv (VH- | QVQLVQSGAEVKKPGSSVKVSCKASGYTFTSYNMHWVRQAP |
| | linker-VL) | GQGLEWMGAIYPGNGDTSYNPKFKGRVTITADKSTRTAYMEL |
| | | SSLRSEDTAVYYCARSYFYGSSSWYFDVWGQGTTVTVSSGGG |
| | | GSGGGGSGGGGSGGGGSDIQLTQSPSFLSASVGDRVTITCRASS |
| | | SVSSMHWYQQKPGKAPKPLIFATSNLASGVPSRFSGSGSGTEY |
| | | TLTISSLQPEDFATYYCQQWIFNPPTFGGGTKVEIK |
| 1173 | Full CAR | MALPVTALLLPLALLLHAARPQVQLVQSGAEVKKPGSSVKVS |
| | | CKASGYTFTSYNMHWVRQAPGQGLEWMGAIYPGNGDTSYNP |
| | | KFKGRVTITADKSTRTAYMELSSLRSEDTAVYYCARSYFYGSS |
| | | SWYFDVWGQGTTVTVSSGGGGSGGGGSGGGGSGGGGSDIQL |
| | | TQSPSFLSASVGDRVTITCRASSSVSSMHWYQQKPGKAPKPLIF |
| | | ATSNLASGVPSRFSGSGSGTEYTLTISSLQPEDFATYYCQQWIF |
| | | NPPTFGGGTKVEIKTTTPAPRPPTPAPTIASQPLSLRPEACRPAA |
| | | GGAVHTRGLDFACDIYIWAPLAGTCGVLLLSLVITLYCKRGRK |
| | | KLLYIFKQPFMRPVQTTQEEDGCSCRFPEEEEGGCELRVKFSRS |
| | | ADAPAYQQGQNQLYNELNLGRREEYDVLDKRRGRDPEMGGK |
| | | PRRKNPQEGLYNELQKDKMAEAYSEIGMKGERRRGKGHDGL |
| | | YQGLSTATKDTYDALHMQALPPR |
| CD20-C3 | | |
| 1174 | VH | QVQLQQPGAELVKPGASVKMSCKASGYTFTNYNLHWVKQTP |
| | | GQGLEWIGAIYPGNYDTSYNQKFKGKATLTADKSSSTAYMLL |
| | | SSLTSEDSAVYFCARVDFGHSRYWYFDVWGAGTTVTVSS |
| 1175 | VL | QIVLSQSPAILSASPGEKVTMTCRATSSVSSMNWYQQKPGSFPR |
| | | PWIHATSNLASGVPARFSGSGSGTSYSLTISRVEAEDAATYYCQ |
| | | QWTFNPPTFGAGAKLELK |
| CD20-C5 | | |
| 1176 | VH | QVQLQQPGAELVKPGASVKMSCKASGYTFTSYNMHWVKQTP |
| | | GQGLEWIGAIYPGNGDTSYNPKFKGKATLTADKSSRTAYIHLS |
| | | SLTSEDSVVYYCARSYFYGSSSWYFDVWGAGTTVTVSS |
| 1177 | VL | QIILSQSPAILSASPGEKVTLTCRASSSVSSMHWYQQKPGSSPKP |
| | | WIFATSNLASGVPARFTGSGSGTSYSLTISRVEAEDAATYYCQQ |
| | | WIFNPPTFGGGTSLEIK |
| CD20-C2 | | |
| 1178 | VH | QVHLQQSGAELAKPGASVKMSCKASGYTFTNYWMHWVKQR |
| | | PGQGLEWIGFITPTTGYPEYNQKFKDKATLTADKSSSTAYMQL |
| | | SSLTSEDSAVYYCARRKVGKGVYYALDYWGQGTSVTVSS |
| 1179 | VL | DILMTQSPASLSASVGETVTITCRASGNIHNYLAWYQQKQGNS |
| | | PQLLVYNTKTLADGVPSRFSGSGSGTQYSLKINSLQTEDFGTYY |
| | | CQHFWSSPWTFGGGTKLEIK |

[0375] CARs that bind to CD22 are known in the art. For example, those disclosed in WO2018/067992 or WO2016/164731. Any known CD22 CAR, for example, the CD22 antigen binding domain of any known CD22 CAR, in the art can be used in accordance with the present disclosure.

[0376] Exemplary CD22-binding sequences or CD22 CAR sequences are disclosed in, for example, Tables 6A, 6B, 7A, 7B, 7C, 8A, 8B, 9A, 9B, 10A, and 10B of WO2016164731 and Tables 6-10 of WO2018067992. In some embodiments, the CD22 CAR sequences comprise a CDR, variable region, scFv or full-length sequence of a CD22 CAR disclosed in WO2018067992 or WO2016164731.

[0377] In embodiments, the CAR comprises an antigen binding domain that binds to CD22 (CD22 CAR). In some embodiments, the antigen binding domain targets human CD22. In some embodiments, the antigen binding domain includes a single chain Fv sequence as described herein.

[0378] The sequences of human CD22 CAR are provided below. In some embodiments, a human CD22 CAR is CAR22-65.

Human CD22 CAR scFv sequence
(SEQ ID NO: 753)
EVQLQQSGPGLVKPSQTLSLTCAISGDSMLSNSDTWNWIRQSPSRGLEWL
GRTYHRSTWYDDYASSVRGRVSINVDTSKNQYSLQLNAVTPEDTGVYYCA
RVRLQDGNSWSDAFDVWGQGTMVTVSSGGGGSGGGGSGGGGSQSALTQPA
SASGSPGQSVTISCTGTSSDVGGYNYVSWYQQHPGKAPKLMIYDVSNRPS
GVSNRFSGSKSGNTASLTISGLQAEDEADYYCSSYTSSSTLYVFGTGTQL
TVL
Human CD22 CAR heavy chain variable region
(SEQ ID NO: 754)
EVQLQQSGPGLVKPSQTLSLTCAISGDSMLSNSDTWNWIRQSPSRGLEWL
GRTYHRSTWYDDYASSVRGRVSINVDTSKNQYSLQLNAVTPEDTGVYYCA
RVRLQDGNSWSDAFDVWGQGTMVTVSS
Human CD22 CAR light chain variable region
(SEQ ID NO 755)
QSALTQPASASGSPGQSVTISCTGTSSDVGGYNYVSWYQQHPGKAPKLMI
YDVSNRPSGVSNRFSGSKSGNTASLTISGLQAEDEADYYCSSYTSSSTLY
VFGTGTQLTVL

[0379] In some embodiments, CD22 CARs comprise a sequence, for example, a CDR, VH, VL, scFv, or full-CAR sequence, disclosed in Tables 15-16 and Table 24 below, or a sequence having at least 70%, 75%, 80%, 85%, 90%, 95%, 96%, 97%, 98%, or 99% identity thereto.

TABLE 15
Heavy Chain Variable Domain CDRs of CD22 CAR
(CAR22-65)

| | | SEQ | | SEQ | | SEQ |
|---|---|---|---|---|---|---|
| | | ID | | ID | | ID |
| Candidate | HCDR1 | NO: | HCDR2 | NO: | HCDR3 | NO: |
| CAR22-65 | GDSMLSNS | 744 | RTYHRST | 746 | VRLQDGN | 748 |
| Combined | DTWN | | WYDDYAS | | SWSDAFD | |
| | | | SVRG | | V | |
| CAR22-65 | SNSDTWN | 745 | RTYHRST | 747 | VRLQDGN | 749 |
| Kabat | | | WYDDYAS | | SWSDAFD | |
| | | | SVRG | | V | |
| CD22-65 | GDSMLSNS | 1180 | YHRSTWY | 1181 | VRLQDGN | 1182 |
| Chothia | D | | | | SWSDAFD | |
| | | | | | V | |
| CD22-65 | GDSMLSNS | 1183 | TYHRSTW | 1184 | ARVRLQD | 1185 |
| IMGT | DT | | YD | | GNSWSDA | |
| | | | | | FDV | |

TABLE 16
Light Chain Variable Domain CDRs of CD22 CAR
(CAR22-65). The LC CDR sequences in this table
have the same sequence under the Kabat or
combined definitions.

| | | SEQ | | SEQ | | SEQ |
|---|---|---|---|---|---|---|
| | | ID | | ID | | ID |
| Candidate | LCDR1 | NO: | LCDR2 | NO: | LCDR3 | NO: |
| CAR22-65 | TGTSSDVG | 750 | DVSNRPS | 751 | SSYTSSSTL | 752 |
| Combined | GYNYVS | | | | YV | |
| CD22-65 | TGTSSDVG | 1186 | DVSNRPS | 1189 | SSYTSSSTL | 1192 |
| Kabat | GYNYVS | | | | YV | |
| CD22-65 | TSSDVGGY | 1187 | DVS | 1190 | YTSSSTLY | 1193 |
| Chothia | NY | | | | | |
| CD22-65 | SSDVGGY | 1188 | DVS | 1191 | SSYTSSSTL | 1194 |
| IMGT | NY | | | | YV | |

TABLE 24
Amino acid sequences of exemplary anti-CD22 molecules

| | | |
|---|---|---|
| SEQ ID NO: | Region | Sequence |

CD22-65s

| | | |
|---|---|---|
| 1195 | scFv (VH- | EVQLQQSGPGLVKPSQTLSLTCAISGDSMLSNSDTWNWIRQSP |
| | linker-VL) | SRGLEWLGRTYHRSTWYDDYASSVRGRVSINVDTSKNQYSL |
| | (linker | QLNAVTPEDTGVYYCARVRLQDGNSWSDAFDVWGQGTMVT |
| | shown by | VSSGGGGSQSALTQPASASGSPGQSVTISCTGTSSDVGGYNYV |
| | italics and | SWYQQHPGKAPKLMIYDVSNRPSGVSNRFSGSKSGNTASLTIS |
| | underline) | GLQAEDEADYYCSSYTSSSTLYVFGTGTQLTVL |

CD22-65ss

| | | |
|---|---|---|
| 1196 | scFv (VH - | EVQLQQSGPGLVKPSQTLSLTCAISGDSMLSNSDTWNWIRQSP |
| | VL) | SRGLEWLGRTYHRSTWYDDYASSVRGRVSINVDTSKNQYSL |
| | (no linker | QLNAVTPEDTGVYYCARVRLQDGNSWSDAFDVWGQGTMVT |
| | between | VSSQSALTQPASASGSPGQSVTISCTGTSSDVGGYNYVSWYQ |
| | VH-VL) | QHPGKAPKLMIYDVSNRPSGVSNRFSGSKSGNTASLTISGLQA |
| | | EDEADYYCSSYTSSSTLYVFGTGTQLTVL |

CD22-65sKD

| | | |
|---|---|---|
| 1197 | VH | EVQLQQSGPGLVKPSQTLSLTCAISGDSMLSNSDTWNWIRKSP |
| | | SRGLEWLGRTYHRSTWYDDYASSVRGRVSINVDTSKNQYSL |
| | | QLNAVTPEDTGVYYCARVRLQDGNSWSDAFDVWGQGTMVT |
| | | VSS |
| 1198 | VL | QSALTQPASASGSPGQSVTISCTGTSSDVGGYNYVSWYQDHP |
| | | GKAPKLMIYDVSNRPSGVSNRFSGSKSGNTASLTISGLQAEDE |
| | | ADYYCSSYTSSSTLYVFGTGTQLTVL |
| 1199 | scFv (VH- | EVQLQQSGPGLVKPSQTLSLTCAISGDSMLSNSDTWNWIRKSP |
| | linker-VL) | SRGLEWLGRTYHRSTWYDDYASSVRGRVSINVDTSKNQYSL |
| | | QLNAVTPEDTGVYYCARVRLQDGNSWSDAFDVWGQGTMVT |
| | | VSSGGGGSQSALTQPASASGSPGQSVTISCTGTSSDVGGYNYV |
| | | SWYQDHPGKAPKLMIYDVSNRPSGVSNRFSGSKSGNTASLTIS |
| | | GLQAEDEADYYCSSYTSSSTLYVFGTGTQLTVL |

CD22-64

| | | |
|---|---|---|
| 1200 | HC CDR1 | SNSDTWN |
| | (Kabat) | |
| 1201 | HC CDR2 | RTYHRSTWYDDYASSVRG |
| | (Kabat) | |
| 1202 | HC CDR3 | VRLQDGNSWSDAFDV |
| | (Kabat) | |
| 1203 | HC CDR1 | GDSVLSNSD |
| | (Chothia) | |
| 1204 | HC CDR2 | YHRSTWY |
| | (Chothia) | |
| 1205 | HC CDR3 | VRLQDGNSWSDAFDV |
| | (Chothia) | |
| 1206 | HC CDR1 | GDSVLSNSDT |
| | (IMGT) | |
| 1207 | HC CDR2 | TYHRSTWYD |
| | (IMGT) | |
| 1208 | HC CDR3 | ARVRLQDGNSWSDAFDV |
| | (IMGT) | |
| 1209 | HC CDR1 | GDSVLSNSDTWN |
| | (Combined) | |
| 1210 | HC CDR2 | RTYHRSTWYDDYASSVRG |
| | (Combined) | |
| 1211 | HC CDR3 | VRLQDGNSWSDAFDV |
| | (Combined) | |
| 1212 | VH | EVQLQQSGPGLVKPSQTLPLTCAISGDSVLSNSDTWNWIRQSP |
| | | SRGLEWLGRTYHRSTWYDDYASSVRGRVSINVDTSKNQYSL |
| | | QLNAVTPEDTGVYYCARVRLQDGNSWSDAFDVWGQGTMVT |
| | | VSS |
| 1213 | LC CDR1 | TGTSSDVGGYNYVS |
| | (Kabat) | |
| 1214 | LC CDR2 | DVSNRPS |
| | (Kabat) | |
| 1215 | LC CDR3 | SSYTSSSTLYV |
| | (Kabat) | |
| 1216 | LC CDR1 | TSSDVGGYNY |
| | (Chothia) | |
| 1217 | LC CDR2 | DVS |
| | (Chothia) | |
| 1218 | LC CDR3 | YTSSSTLY |
| | (Chothia) | |
| 1219 | LC CDR1 | SSDVGGYNY |
| | (IMGT) | |
| 1220 | LC CDR2 | DVS |
| | (IMGT) | |
| 1221 | LC CDR3 | SSYTSSSTLYV |
| | (IMGT) | |
| 1222 | LC CDR1 | TGTSSDVGGYNYVS |
| | (Combined) | |
| 1223 | LC CDR2 | DVSNRPS |
| | (Combined) | |
| 1224 | LC CDR3 | SSYTSSSTLYV |
| | (Combined) | |
| 1225 | VL | QSALTQPASASGSPGQSVTISCTGTSSDVGGYNYVSWYQQHP |
| | | GKAPKLMIYDVSNRPSGVSNRFSGSKSGNTASLTISGLQAEDE |
| | | ADYYCSSYTSSSTLYVFGTGTQLTVL |
| 1226 | scFv (VH- | EVQLQQSGPGLVKPSQTLPLTCAISGDSVLSNSDTWNWIRQSP |
| | linker-VL) | SRGLEWLGRTYHRSTWYDDYASSVRGRVSINVDTSKNQYSL |
| | | QLNAVTPEDTGVYYCARVRLQDGNSWSDAFDVWGQGTMVT |
| | | VSSGGGGSGGGGSGGGGPQSALTQPASASGSPGQSVTISCTGT |
| | | SSDVGGYNYVSWYQQHPGKAPKLMIYDVSNRPSGVSNRFSG |
| | | SKSGNTASLTISGLQAEDEADYYCSSYTSSSTLYVFGTGTQLT |
| | | VL |

CD22-57

| | | |
|---|---|---|
| 1227 | HC CDR1 | NNNAAWN |
| | (Kabat) | |
| 1228 | HC CDR2 | RTYHRSTWYNDYVGSVKS |
| | (Kabat) | |
| 1229 | HC CDR3 | ETDYGDYGAFDI |
| | (Kabat) | |
| 1230 | HC CDR1 | GDSVSNNNA |
| | (Chothia) | |
| 1231 | HC CDR2 | YHRSTWY |
| | (Chothia) | |
| 1232 | HC CDR3 | ETDYGDYGAFDI |
| | (Chothia) | |
| 1233 | HC CDR1 | GDSVSNNNAA |
| | (IMGT) | |
| 1234 | HC CDR2 | TYHRSTWYN |
| | (IMGT) | |
| 1235 | HC CDR3 | ARETDYGDYGAFDI |
| | (IMGT) | |
| 1236 | HC CDR1 | GDSVSNNNAAWN |
| | (Combined) | |
| 1237 | HC CDR2 | RTYHRSTWYNDYVGSVKS |
| | (Combined) | |
| 1238 | HC CDR3 | ETDYGDYGAFDI |
| | (Combined) | |
| 1239 | VH | EVQLQQSGPGLVKPSQTLSLTCAISGDSVSNNNAAWNWIRQS |
| | | PSRGLEWLGRTYHRSTWYNDYVGSVKSRITINPDTSKNQFSL |
| | | QLNSVTPEDTAVYYCARETDYGDYGAFDIWGQGTTVTVSS |
| 1240 | LC CDR1 | TGSRNDIGAYESVS |
| | (Kabat) | |
| 1241 | LC CDR2 | GVNNRPS |
| | (Kabat) | |
| 1242 | LC CDR3 | SSHTTTSTLYV |
| | (Kabat) | |
| 1243 | LC CDR1 | SRNDIGAYES |
| | (Chothia) | |
| 1244 | LC CDR2 | GVN |
| | (Chothia) | |
| 1245 | LC CDR3 | HTTTSTLY |
| | (Chothia) | |
| 1246 | LC CDR1 | RNDIGAYES |
| | (IMGT) | |
| 1247 | LC CDR2 | GVN |
| | (IMGT) | |
| 1248 | LC CDR3 | SSHTTTSTLYV |
| | (IMGT) | |
| 1249 | LC CDR1 | TGSRNDIGAYESVS |
| | (Combined) | |
| 1250 | LC CDR2 | GVNNRPS |
| | (Combined) | |
| 1251 | LC CDR3 | SSHTTTSTLYV |
| | (Combined) | |
| 1252 | VL | QSALTQPASVSGSPGQSITISCTGSRNDIGAYESVSWYQQHPG |
| | | NAPKLIIHGVNNRPSGVFDRFSVSQSGNTASLTISGLQAEDEAD |
| | | YYCSSHTTTSTLYVFGTGTKVTVL |
| 1253 | scFv (VH- | EVQLQQSGPGLVKPSQTLSLTCAISGDSVSNNNAAWNWIRQS |
| | linker-VL) | PSRGLEWLGRTYHRSTWYNDYVGSVKSRITINPDTSKNQFSL |
| | | QLNSVTPEDTAVYYCARETDYGDYGAFDIWGQGTTVTVSSG |
| | | GGGSGGGGSGGGGSQSALTQPASVSGSPGQSITISCTGSRNDIG |
| | | AYESVSWYQQHPGNAPKLIIHGVNNRPSGVFDRFSVSQSGNT |
| | | ASLTISGLQAEDEADYYCSSHTTTSTLYVFGTGTKVTVL |

CD22-58

| | | |
|---|---|---|
| 1254 | HC CDR1 | SNSAAWN |
| | (Kabat) | |
| 1255 | HC CDR2 | RTFYRSKWYNDYAVSVKG |
| | (Kabat) | |
| 1256 | HC CDR3 | GDYYYGLDV |
| | (Kabat) | |
| 1257 | HC CDR1 | GDSVSSNSA |
| | (Chothia) | |
| 1258 | HC CDR2 | FYRSKWY |
| | (Chothia) | |
| 1259 | HC CDR3 | GDYYYGLDV |
| | (Chothia) | |
| 1260 | HC CDR1 | GDSVSSNSAA |
| | (IMGT) | |
| 1261 | HC CDR2 | TFYRSKWYN |
| | (IMGT) | |
| 1262 | HC CDR3 | AGGDYYYGLDV |
| | (IMGT) | |
| 1263 | HC CDR1 | GDSVSSNSAAWN |
| | (Combined) | |
| 1264 | HC CDR2 | RTFYRSKWYNDYAVSVKG |
| | (Combined) | |
| 1265 | HC CDR3 | GDYYYGLDV |
| | (Combined) | |
| 1266 | VH | EVQLQQSGPGLVNPSQTLSITCAISGDSVSSNSAAWNWIRQSP |
| | | SRGLEWLGRTFYRSKWYNDYAVSVKGRITISPDTSKNQFSLQ |
| | | LNSVTPEDTAVYYCAGGDYYYGLDVWGQGTTVTVSS |
| 1267 | LC CDR1 | TGSSSDVGGYNSVS |
| | (Kabat) | |
| 1268 | LC CDR2 | EVINRPS |
| | (Kabat) | |
| 1269 | LC CDR3 | SSYTSSSTYV |
| | (Kabat) | |
| 1270 | LC CDR1 | SSSDVGGYNS |
| | (Chothia) | |
| 1271 | LC CDR2 | EVI |
| | (Chothia) | |
| 1272 | LC CDR3 | YTSSSTY |
| | (Chothia) | |
| 1273 | LC CDR1 | SSDVGGYNS |
| | (IMGT) | |
| 1274 | LC CDR2 | EVI |
| | (IMGT) | |
| 1275 | LC CDR3 | SSYTSSSTYV |
| | (IMGT) | |
| 1276 | LC CDR1 | TGSSSDVGGYNSVS |
| | (Combined) | |
| 1277 | LC CDR2 | EVINRPS |
| | (Combined) | |
| 1278 | LC CDR3 | SSYTSSSTYV |
| | (Combined) | |
| 1279 | VL | QSALTQPASVSGSPGQSITISCTGSSSDVGGYNSVSWYQQHPG |
| | | KAPKLMIYEVINRPSGVSHRFSGSKSGNTASLTISGLQAEDEA |
| | | DYYCSSYTSSSTYVFGTGTKVTVL |
| 1280 | scFv (VH- | EVQLQQSGPGLVNPSQTLSITCAISGDSVSSNSAAWNWIRQSP |
| | linker-VL) | SRGLEWLGRTFYRSKWYNDYAVSVKGRITISPDTSKNQFSLQ |
| | | LNSVTPEDTAVYYCAGGDYYYGLDVWGQGTTVTVSSGGGGS |
| | | GGGGSGGGGSQSALTQPASVSGSPGQSITISCTGSSSDVGGYN |
| | | SVSWYQQHPGKAPKLMIYEVINRPSGVSHRFSGSKSGNTASLT |
| | | ISGLQAEDEADYYCSSYTSSSTYVFGTGTKVTVL |

CD22-59

| | | |
|---|---|---|
| 1281 | HC CDR1 | SNSDTWN |
| | (Kabat) | |
| 1282 | HC CDR2 | RTYHRSTWYDDYASSVRG |
| | (Kabat) | |
| 1283 | HC CDR3 | DRLQDGNSWSDAFDV |
| | (Kabat) | |
| 1284 | HC CDR1 | GDSVLSNSD |
| | (Chothia) | |
| 1285 | HC CDR2 | YHRSTWY |
| | (Chothia) | |
| 1286 | HC CDR3 | DRLQDGNSWSDAFDV |
| | (Chothia) | |
| 1287 | HC CDR1 | GDSVLSNSDT |
| | (IMGT) | |
| 1288 | HC CDR2 | TYHRSTWYD |
| | (IMGT) | |
| 1289 | HC CDR3 | ARDRLQDGNSWSDAFDV |
| | (IMGT) | |
| 1290 | HC CDR1 | GDSVLSNSDTWN |
| | (Combined) | |
| 1291 | HC CDR2 | RTYHRSTWYDDYASSVRG |
| | (Combined) | |
| 1292 | HC CDR3 | DRLQDGNSWSDAFDV |
| | (Combined) | |
| 1293 | VH | EVQLQQSGPGLVKPSQTLSLTCAISGDSVLSNSDTWNWIRQSP |
| | | SRGLEWLGRTYHRSTWYDDYASSVRGRVSINVDTSKNQYSL |
| | | QLNAVTPEDTGVYYCARDRLQDGNSWSDAFDVWGQGTMVT |
| | | VSS |
| 1294 | LC CDR1 | TGSSSDIGGFNYVS |
| | (Kabat) | |
| 1295 | LC CDR2 | EVTNRPS |
| | (Kabat) | |
| 1296 | LC CDR3 | SSYASGSPLYV |
| | (Kabat) | |
| 1297 | LC CDR1 | SSSDIGGFNY |
| | (Chothia) | |
| 1298 | LC CDR2 | EVT |
| | (Chothia) | |
| 1299 | LC CDR3 | YASGSPLY |
| | (Chothia) | |
| 1300 | LC CDR1 | SSDIGGFNY |
| | (IMGT) | |
| 1301 | LC CDR2 | EVT |
| | (IMGT) | |
| 1302 | LC CDR3 | SSYASGSPLYV |
| | (IMGT) | |
| 1303 | LC CDR1 | TGSSSDIGGFNYVS |
| | (Combined) | |
| 1304 | LC CDR2 | EVTNRPS |
| | (Combined) | |
| 1305 | LC CDR3 | SSYASGSPLYV |
| | (Combined) | |
| 1306 | VL | QSALTQPASVSGSPGQSITISCTGSSSDIGGFNYVSWYQQHAGE |
| | | APKLMIYEVTNRPSGVSDRFSGSKSDNTASLTISGLQAEDEAD |
| | | YYCSSYASGSPLYVFGTGTKVTVL |
| 1307 | scFv (VH- | EVQLQQSGPGLVKPSQTLSLTCAISGDSVLSNSDTWNWIRQSP |
| | linker-VL) | SRGLEWLGRTYHRSTWYDDYASSVRGRVSINVDTSKNQYSL |
| | | QLNAVTPEDTGVYYCARDRLQDGNSWSDAFDVWGQGTMVT |
| | | VSSGGGGSGGGGSGGGGSQSALTQPASVSGSPGQSITISCTGSS |
| | | SDIGGFNYVSWYQQHAGEAPKLMIYEVTNRPSGVSDRFSGSK |
| | | SDNTASLTISGLQAEDEADYYCSSYASGSPLYVFGTGTKVTVL |

CD22-60

| | | |
|---|---|---|
| 1308 | HC CDR1 | SNSDTWN |
| | (Kabat) | |
| 1309 | HC CDR2 | RTYHRSTWYDDYASSVRG |
| | (Kabat) | |
| 1310 | HC CDR3 | DRLQDGNSWSDAFDV |
| | (Kabat) | |
| 1311 | HC CDR1 | GDSVLSNSD |
| | (Chothia) | |
| 1312 | HC CDR2 | YHRSTWY |
| | (Chothia) | |
| 1313 | HC CDR3 | DRLQDGNSWSDAFDV |
| | (Chothia) | |
| 1314 | HC CDR1 | GDSVLSNSDT |
| | (IMGT) | |
| 1315 | HC CDR2 | TYHRSTWYD |
| | (IMGT) | |
| 1316 | HC CDR3 | ARDRLQDGNSWSDAFDV |
| | (IMGT) | |
| 1317 | HC CDR1 | GDSVLSNSDTWN |
| | (Combined) | |
| 1318 | HC CDR2 | RTYHRSTWYDDYASSVRG |
| | (Combined) | |
| 1319 | HC CDR3 | DRLQDGNSWSDAFDV |
| | (Combined) | |
| 1320 | VH | EVQLQQSGPGLVKPSQTLSLTCAISGDSVLSNSDTWNWIRQSP |
| | | SRGLEWLGRTYHRSTWYDDYASSVRGRVSINVDTSKNQYSL |
| | | QLNAVTPEDTGVYYCARDRLQDGNSWSDAFDVWGQGTMVT |
| | | VSS |
| 1321 | LC CDR1 | TGTSSDIGGYNYVS |
| | (Kabat) | |
| 1322 | LC CDR2 | EVSNRPS |
| | (Kabat) | |
| 1323 | LC CDR3 | SSYTSSSTLYV |
| | (Kabat) | |
| 1324 | LC CDR1 | TSSDIGGYNY |
| | (Chothia) | |
| 1325 | LC CDR2 | EVS |
| | (Chothia) | |
| 1326 | LC CDR3 | YTSSSTLY |
| | (Chothia) | |
| 1327 | LC CDR1 | SSDIGGYNY |
| | (IMGT) | |
| 1328 | LC CDR2 | EVS |
| | (IMGT) | |
| 1329 | LC CDR3 | SSYTSSSTLYV |
| | (IMGT) | |
| 1330 | LC CDR1 | TGTSSDIGGYNYVS |
| | (Combined) | |
| 1331 | LC CDR2 | EVSNRPS |
| | (Combined) | |
| 1332 | LC CDR3 | SSYTSSSTLYV |
| | (Combined) | |
| 1333 | VL | QSALTQPASVSGSPGQSITFSCTGTSSDIGGYNYVSWYQQHPG |
| | | KAPKLMIYEVSNRPSGVSNRFSGTKSGNTASLTISGLQAEDEA |
| | | DYYCSSYTSSSTLYVFGTGTKLTVL |
| 1334 | scFv (VH- | EVQLQQSGPGLVKPSQTLSLTCAISGDSVLSNSDTWNWIRQSP |
| | linker-VL) | SRGLEWLGRTYHRSTWYDDYASSVRGRVSINVDTSKNQYSL |
| | | QLNAVTPEDTGVYYCARDRLQDGNSWSDAFDVWGQGTMVT |
| | | VSSGGGGSGGGGSGSGGSQSALTQPASVSGSPGQSITFSCTGT |
| | | SSDIGGYNYVSWYQQHPGKAPKLMIYEVSNRPSGVSNRFSGT |
| | | KSGNTASLTISGLQAEDEADYYCSSYTSSSTLYVFGTGTKLTV |
| | | L |

CD22-61

| | | |
|---|---|---|
| 1335 | HC CDR1 | SNSDTWN |
| | (Kabat) | |
| 1336 | HC CDR2 | RTYHRSTWYDDYASSVRG |
| | (Kabat) | |
| 1337 | HC CDR3 | DRLQDGNSWSDAFDV |
| | (Kabat) | |
| 1338 | HC CDR1 | GDSVLSNSD |
| | (Chothia) | |
| 1339 | HC CDR2 | YHRSTWY |
| | (Chothia) | |
| 1340 | HC CDR3 | DRLQDGNSWSDAFDV |
| | (Chothia) | |
| 1341 | HC CDR1 | GDSVLSNSDT |
| | (IMGT) | |
| 1342 | HC CDR2 | TYHRSTWYD |
| | (IMGT) | |
| 1343 | HC CDR3 | ARDRLQDGNSWSDAFDV |
| | (IMGT) | |
| 1344 | HC CDR1 | GDSVLSNSDTWN |
| | (Combined) | |
| 1345 | HC CDR2 | RTYHRSTWYDDYASSVRG |
| | (Combined) | |
| 1346 | HC CDR3 | DRLQDGNSWSDAFDV |
| | (Combined) | |
| 1347 | VH | QVQLQESGPGLVKPSQTLSLTCAISGDSVLSNSDTWNWIRQSP |
| | | SRGLEWLGRTYHRSTWYDDYASSVRGRVSINVDTSKNQYSL |
| | | QLNAVTPEDTGVYYCARDRLQDGNSWSDAFDVWGQGTMVT |
| | | VSS |
| 1348 | LC CDR1 | TGTSSDVGGYNYVS |
| | (Kabat) | |
| 1349 | LC CDR2 | EVSNRPS |
| | (Kabat) | |
| 1350 | LC CDR3 | SSYTSSSTLYV |
| | (Kabat) | |
| 1351 | LC CDR1 | TSSDVGGYNY |
| | (Chothia) | |
| 1352 | LC CDR2 | EVS |
| | (Chothia) | |
| 1353 | LC CDR3 | YTSSSTLY |
| | (Chothia) | |
| 1354 | LC CDR1 | SSDVGGYNY |
| | (IMGT) | |
| 1355 | LC CDR2 | EVS |
| | (IMGT) | |
| 1356 | LC CDR3 | SSYTSSSTLYV |
| | (IMGT) | |
| 1357 | LC CDR1 | TGTSSDVGGYNYVS |
| | (Combined) | |
| 1358 | LC CDR2 | EVSNRPS |
| | (Combined) | |
| 1359 | LC CDR3 | SSYTSSSTLYV |
| | (Combined) | |
| 1360 | VL | QSALTQPASVSGSPGQSITISCTGTSSDVGGYNYVSWYQQHPG |
| | | KAPKLMIYEVSNRPSGVSNRFSGSKSGNTASLTISGLQAEDEA |
| | | DYYCSSYTSSSTLYVFGTGTKVTVL |
| 1361 | scFv (VH- | QVQLQESGPGLVKPSQTLSLTCAISGDSVLSNSDTWNWIRQSP |
| | linker-VL) | SRGLEWLGRTYHRSTWYDDYASSVRGRVSINVDTSKNQYSL |
| | | QLNAVTPEDTGVYYCARDRLQDGNSWSDAFDVWGQGTMVT |
| | | VSSGGGGSGGGGSGSGGSQSALTQPASVSGSPGQSITISCTGTS |
| | | SDVGGYNYVSWYQQHPGKAPKLMIYEVSNRPSGVSNRFSGS |
| | | KSGNTASLTISGLQAEDEADYYCSSYTSSSTLYVFGTGTKVTV |
| | | L |

CD22-62

| | | |
|---|---|---|
| 1362 | HC CDR1 | SNSDTWN |
| | (Kabat) | |
| 1363 | HC CDR2 | RTYHRSTWYDDYASSVRG |
| | (Kabat) | |
| 1364 | HC CDR3 | DRLQDGNSWSDAFDV |
| | (Kabat) | |
| 1365 | HC CDR1 | GDSVLSNSD |
| | (Chothia) | |
| 1366 | HC CDR2 | YHRSTWY |
| | (Chothia) | |
| 1367 | HC CDR3 | DRLQDGNSWSDAFDV |
| | (Chothia) | |
| 1368 | HC CDR1 | GDSVLSNSDT |
| | (IMGT) | |
| 1369 | HC CDR2 | TYHRSTWYD |
| | (IMGT) | |
| 1370 | HC CDR3 | ARDRLQDGNSWSDAFDV |
| | (IMGT) | |
| 1371 | HC CDR1 | GDSVLSNSDTWN |
| | (Combined) | |
| 1372 | HC CDR2 | RTYHRSTWYDDYASSVRG |
| | (Combined) | |
| 1373 | HC CDR3 | DRLQDGNSWSDAFDV |
| | (Combined) | |
| 1374 | VH | EVQLQQSGPGLVKPSQTLSLTCAISGDSVLSNSDTWNWIRQSP |
| | | SRGLEWLGRTYHRSTWYDDYASSVRGRVSINVDTSKNQYSL |
| | | QLNAVTPEDTGVYYCARDRLQDGNSWSDAFDVWGQGTMVT |
| | | VSS |
| 1375 | LC CDR1 | TGTSSDVGGYNYVS |
| | (Kabat) | |
| 1376 | LC CDR2 | DVSNRPS |
| | (Kabat) | |
| 1377 | LC CDR3 | SSYTSSSTLYV |
| | (Kabat) | |
| 1378 | LC CDR1 | TSSDVGGYNY |
| | (Chothia) | |
| 1379 | LC CDR2 | DVS |
| | (Chothia) | |
| 1380 | LC CDR3 | YTSSSTLY |
| | (Chothia) | |
| 1381 | LC CDR1 | SSDVGGYNY |
| | (IMGT) | |
| 1382 | LC CDR2 | DVS |
| | (IMGT) | |
| 1383 | LC CDR3 | SSYTSSSTLYV |
| | (IMGT) | |
| 1384 | LC CDR1 | TGTSSDVGGYNYVS |
| | (Combined) | |
| 1385 | LC CDR2 | DVSNRPS |
| | (Combined) | |
| 1386 | LC CDR3 | SSYTSSSTLYV |
| | (Combined) | |
| 1387 | VL | QSALTQPASVSGSPGQSITISCTGTSSDVGGYNYVSWYQQHPG |
| | | KAPKLMIYDVSNRPSGVSNRFSGSKSGNTASLTISGLQAEDEA |
| | | DYYCSSYTSSSTLYVFGTGTKVTVL |
| 1388 | scFv (VH- | EVQLQQSGPGLVKPSQTLSLTCAISGDSVLSNSDTWNWIRQSP |
| | linker-VL) | SRGLEWLGRTYHRSTWYDDYASSVRGRVSINVDTSKNQYSL |
| | | QLNAVTPEDTGVYYCARDRLQDGNSWSDAFDVWGQGTMVT |
| | | VSSGGGGSGGGGSGGGGSQSALTQPASVSGSPGQSITISCTGTS |
| | | SDVGGYNYVSWYQQHPGKAPKLMIYDVSNRPSGVSNRFSGS |
| | | KSGNTASLTISGLQAEDEADYYCSSYTSSSTLYVFGTGTKVTV |
| | | L |

CD22-63

| | | |
|---|---|---|
| 1389 | HC CDR1 | SNSDTWN |
| | (Kabat) | |
| 1390 | HC CDR2 | RTYHRSTWYDDYASSVRG |
| | (Kabat) | |
| 1391 | HC CDR3 | DRLQDGNSWSDAFDV |
| | (Kabat) | |
| 1392 | HC CDR1 | GDSVLSNSD |
| | (Chothia) | |
| 1393 | HC CDR2 | YHRSTWY |
| | (Chothia) | |
| 1394 | HC CDR3 | DRLQDGNSWSDAFDV |
| | (Chothia) | |
| 1395 | HC CDR1 | GDSVLSNSDT |
| | (IMGT) | |
| 1396 | HC CDR2 | TYHRSTWYD |
| | (IMGT) | |
| 1397 | HC CDR3 | ARDRLQDGNSWSDAFDV |
| | (IMGT) | |
| 1398 | HC CDR1 | GDSVLSNSDTWN |
| | (Combined) | |
| 1399 | HC CDR2 | RTYHRSTWYDDYASSVRG |
| | (Combined) | |
| 1400 | HC CDR3 | DRLQDGNSWSDAFDV |
| | (Combined) | |
| 1401 | VH | EVQLQQSGPGLVKPSQTLSLTCAISGDSVLSNSDTWNWIRQSP |
| | | SRGLEWLGRTYHRSTWYDDYASSVRGRVSINVDTSKNQYSL |
| | | QLNAVTPEDTGVYYCARDRLQDGNSWSDAFDVWGQGTMVT |
| | | VSS |
| 1402 | LC CDR1 | TGTSSDVGGYNYVS |
| | (Kabat) | |
| 1403 | LC CDR2 | EVSNRPS |
| | (Kabat) | |
| 1404 | LC CDR3 | SSYTSSSTLYI |
| | (Kabat) | |
| 1405 | LC CDR1 | TSSDVGGYNY |
| | (Chothia) | |
| 1406 | LC CDR2 | EVS |
| | (Chothia) | |
| 1407 | LC CDR3 | YTSSSTLY |
| | (Chothia) | |
| 1408 | LC CDR1 | SSDVGGYNY |
| | (IMGT) | |
| 1409 | LC CDR2 | EVS |
| | (IMGT) | |
| 1410 | LC CDR3 | SSYTSSSTLYI |
| | (IMGT) | |
| 1411 | LC CDR1 | TGTSSDVGGYNYVS |
| | (Combined) | |
| 1412 | LC CDR2 | EVSNRPS |
| | (Combined) | |
| 1413 | LC CDR3 | SSYTSSSTLYI |
| | (Combined) | |
| 1414 | VL | QSALTQPASVSGSPGQSITISCTGTSSDVGGYNYVSWYQQHPG |
| | | KAPKLMIYEVSNRPSGVSNRFSGSKSGNTASLTISGLQAEDEA |
| | | DYYCSSYTSSSTLYIFGTGTKVTVL |
| 1415 | scFv (VH- | EVQLQQSGPGLVKPSQTLSLTCAISGDSVLSNSDTWNWIRQSP |
| | linker-VL) | SRGLEWLGRTYHRSTWYDDYASSVRGRVSINVDTSKNQYSL |
| | | QLNAVTPEDTGVYYCARDRLQDGNSWSDAFDVWGQGTMVT |
| | | VSSGGGGSGGGGSGGGGSQSALTQPASVSGSPGQSITISCTGTS |
| | | SDVGGYNYVSWYQQHPGKAPKLMIYEVSNRPSGVSNRFSGS |
| | | KSGNTASLTISGLQAEDEADYYCSSYTSSSTLYIFGTGTKVTVL |

[0380] CARs that bind to EGFR are known in the art. For example, those disclosed in WO2014/130657, incorporated by reference herein. Any known EGFR CAR, for example, the EGFR antigen binding domain of any known EGFR CAR, in the art can be used in accordance with the present disclosure. Exemplary EGFRvIII CARs can include a CDR, a variable region, an scFv, or a full-length CAR sequence disclosed in WO2014/130657, for example, Table 2 of WO2014/130657, incorporated herein by reference.

[0381] CARs that bind to CD123 are known in the art. For example, those disclosed in WO2014/130635 or WO2016/028896. Any known CD123 CAR, for example, the CD123 antigen binding domain of any known CD123 CAR, in the art can be used in accordance with the present disclosure. For example, CAR1 to CAR8 disclosed in WO2014/130635; or CAR123-1 to CAR123-4 and hzCAR123-1 to hzCAR123-32, disclosed in WO2016/028896. The amino acid and nucleotide sequences encoding the CD123 CAR molecules and antigen binding domains (for example, including one, two, three VH CDRs; and one, two, three VL CDRs according to Kabat or Chothia), are specified in WO 2014/130635 and WO2016/028896. CARs that bind to CLL-1 are known in the art. For example, those disclosed in US2016/0051651A1, incorporated herein by reference. Any known CLL-1 CAR, for example, the CLL-1 antigen binding domain of any known CLL-1 CAR, in the art can be used in accordance with the present disclosure.

[0382] In some embodiments, the CAR comprises a CLL-1 CAR or antigen binding domain according to Table 2 of WO2016/014535, incorporated herein by reference. The amino acid and nucleotide sequences encoding the CLL-1 CAR molecules and antigen binding domains (for example, including one, two, three VH CDRs; and one, two, three VL CDRs according to Kabat or Chothia), are specified in WO2016/014535.

[0383] CARs that bind to CD33 are known in the art. For example, those disclosed in US2016/0096892A1 and WO2016/014576, incorporated by reference herein. Any known CD33 CAR, for example, the CD33 antigen binding domain of any known CD33 CAR, in the art can be used in accordance with the present disclosure. For example, CAR33-1 to CAR33-9 disclosed in WO2016/014576.

[0384] In some embodiments, the CAR comprises a CD33 CAR or antigen binding domain according to Table 2 or 9 of WO2016/014576, incorporated herein by reference. The amino acid and nucleotide sequences encoding the CD33 CAR molecules and antigen binding domains (for example, including one, two, three VH CDRs; and one, two, three VL CDRs according to Kabat or Chothia), are specified in WO2016/014576.

[0385] CARs that bind to mesothelin are known in the art. For example, those disclosed in WO2015090230 and WO2017112741, for example, Tables 2, 3, 4, and 5 of WO2017112741, incorporated herein by reference, that bind human mesothelin. Any known mesothelin CAR, for example, the mesothelin antigen binding domain of any known mesothelin CAR, in the art can be used in accordance with the present disclosure.

[0386] CARs that bind to GFR ALPHA-4 are known in the art. For example, those disclosed in WO2016/025880. Any known GFR ALPHA-4 CAR, for example, the GFR ALPHA-4 antigen binding domain of any known GFR ALPHA-4 CAR, in the art can be used in accordance with the present disclosure. The amino acid and nucleotide sequences encoding the GFR ALPHA-4 CAR molecules and antigen binding domains (for example, including one, two, three VH CDRs; and one, two, three VL CDRs according to Kabat or Chothia), are specified in WO2016/025880.

[0387] Antigen Binding Domain Structures

[0388] In some embodiments, the antigen binding domain of the encoded CAR molecule comprises an antibody, an antibody fragment, an scFv, a Fv, a Fab, a (Fab′)2, a single domain antibody (SDAB), a VH or VL domain, a camelid VHH domain or a bi-functional (e.g. bi-specific) hybrid antibody (e.g., Lanzavecchia et al., Eur. J. Immunol. 17, 105 (1987)). In some instances, scFvs can be prepared according to method known in the art (see, for example, Bird et al., (1988) Science 242:423-426 and Huston et al., (1988) Proc. Natl. Acad. Sci. USA 85:5879-5883). ScFv molecules can be produced by linking VH and VL regions together using flexible polypeptide linkers. The scFv molecules comprise a linker (e.g., a Ser-Gly linker) with an optimized length and/or amino acid composition. The linker length can greatly affect how the variable regions of a scFv fold and interact. In fact, if a short polypeptide linker is employed (e.g., between 5-10 amino acids) intrachain folding is prevented. Interchain folding is also required to bring the two variable regions together to form a functional epitope binding site. For examples of linker orientation and size see, e.g., Hollinger et al. 1993 Proc Natl Acad. Sci. U.S.A. 90:6444-6448, U.S. Patent Application Publication Nos. 2005/0100543, 2005/0175606, 2007/0014794, and PCT publication Nos. WO2006/020258 and WO2007/024715, is incorporated herein by reference.

[0389] An scFv can comprise a linker of at least 1, 2, 3, 4, 5, 6, 7, 8, 9, 10, 11, 12, 13, 14, 15, 16, 17, 18, 19, 20, 25, 30, 35, 40, 45, 50, or more amino acid residues between its VL and VH regions. The linker sequence may comprise any naturally occurring amino acid. In some embodiments, the linker sequence comprises amino acids glycine and serine. In another embodiment, the linker sequence comprises sets of glycine and serine repeats such as (Gly4Ser)n, where n is a positive integer equal to or greater than 1 (SEQ ID NO:22). In some embodiments, the linker can be (Gly4Ser)4 (SEQ ID NO:29) or (Gly4Ser)3(SEQ ID NO:30). Variation in the linker length may retain or enhance activity, giving rise to superior efficacy in activity studies.

[0390] In another aspect, the antigen binding domain is a T cell receptor (“TCR”), or a fragment thereof, for example, a single chain TCR (scTCR). Methods to make such TCRs are known in the art. See, e.g., Willemsen R A et al, Gene Therapy 7: 1369-1377 (2000); Zhang T et al, Cancer Gene Ther 11: 487-496 (2004); Aggen et al, Gene Ther. 19(4):365-74 (2012) (references are incorporated herein by its entirety). For example, scTCR can be engineered that contains the Vα and Vβ genes from a T cell clone linked by a linker (e.g., a flexible peptide). This approach is very useful to cancer associated target that itself is intracellular, however, a fragment of such antigen (peptide) is presented on the surface of the cancer cells by MHC.

In certain embodiments, the encoded antigen binding domain has a binding affinity KD of 10⁻⁴ M to 10⁻⁸ M.

[0391] In some embodiments, the encoded CAR molecule comprises an antigen binding domain that has a binding affinity KD of 10⁻⁴ M to 10⁻⁸ M, e.g., 10⁻⁵ M to 10⁻⁷ M, e.g., 10⁻⁶ M or 10⁻⁷ M, for the target antigen. In some embodiments, the antigen binding domain has a binding affinity that is at least five-fold, 10-fold, 20-fold, 30-fold, 50-fold, 100-fold or 1,000-fold less than a reference antibody, e.g., an antibody described herein. In some embodiments, the encoded antigen binding domain has a binding affinity at least 5-fold less than a reference antibody (e.g., an antibody from which the antigen binding domain is derived). In some aspects such antibody fragments are functional in that they provide a biological response that can include, but is not limited to, activation of an immune response, inhibition of signal-transduction origination from its target antigen, inhibition of kinase activity, and the like, as will be understood by a skilled artisan.

[0392] In some aspects, the antigen binding domain of the CAR is a scFv antibody fragment that is humanized compared to the murine sequence of the scFv from which it is derived.

In some aspects, the antigen binding domain of a CAR described herein (e.g., a scFv) is encoded by a nucleic acid molecule whose sequence has been codon optimized for expression in a mammalian cell. In some aspects, entire CAR construct of the invention is encoded by a nucleic acid molecule whose entire sequence has been codon optimized for expression in a mammalian cell. Codon optimization refers to the discovery that the frequency of occurrence of synonymous codons (i.e., codons that code for the same amino acid) in coding DNA is biased in different species. Such codon degeneracy allows an identical polypeptide to be encoded by a variety of nucleotide sequences. A variety of codon optimization methods is known in the art, and include, e.g., methods disclosed in at least U.S. Pat. Nos. 5,786,464 and 6,114,148.

[0393] Specific antigen antibody pairs are known in the art. Non-limiting exemplary embodiments of antigen antibody pairs and components thereof are provided herein above in the section titled Targets and below.

[0394] CD19

[0395] In some embodiments, the antigen binding domain binds to CD19 and has the same or a similar binding specificity as the FMC63 scFv fragment described in Nicholson et al. Mol. Immun. 34 (16-17): 1157-1165 (1997). In some embodiments, the antigen binding domain binds to CD19 and includes the scFv fragment described in Nicholson et al. Mol. Immun. 34 (16-17): 1157-1165 (1997).

[0396] In some embodiments, the antigen binding domain (for example, a humanized antigen binding domain) binds to CD19 and comprises a sequence from Table 3 of WO2014/153270, incorporated herein by reference. WO2014/153270 also describes methods of assaying the binding and efficacy of various CAR constructs.

[0397] Humanization of murine CD19 antibody is desired for the clinical setting, where the mouse-specific residues may induce a human-anti-mouse antigen (HAMA) response in patients who receive CART19 treatment, i.e., treatment with T cells transduced with the CAR19 construct. The production, characterization, and efficacy of humanized CD19 CAR sequences is described in International Application WO2014/153270 which is herein incorporated by reference in its entirety, including Examples 1-5 (p. 115-159).

[0398] In some embodiments, the antigen binding domain comprises the parental murine scFv sequence of the CAR19 construct provided in WO2012/079000 (incorporated herein by reference). In some embodiments, the antigen binding domain binds CD19 and comprises a scFv described in WO2012/079000.

[0399] BCMA

[0400] Exemplary antigen binding domains that bind BCMA are disclosed in WO2012/0163805, WO 2017/021450, WO 2017/011804, WO 2017/025038, WO 2016/090327, WO 2016/130598, WO 2016/210293, WO 2016/090320, WO 2016/014789, WO 2016/094304, WO 2016/154055, WO 2015/166073, WO 2015/188119, WO 2015/158671, U.S. Pat. Nos. 9,243,058, 8,920,776, 9,273,141, 7,083,785, 9,034,324, US 2007/0049735, US 2015/0284467, US 2015/0051266, US 2015/0344844, US 2016/0131655, US 2016/0297884, US 2016/0297885, US 2017/0051308, US 2017/0051252, US 2017/0051252, WO 2016/020332, WO 2016/087531, WO 2016/079177, WO 2015/172800, WO 2017/008169, U.S. Pat. No. 9,340,621, US 2013/0273055, US 2016/0176973, US 2015/0368351, US 2017/0051068, US 2016/0368988, and US 2015/0232557, herein incorporated by reference in their entirety. In some embodiments, the antigen binding domain of one or more of the BCMA antigen binding domains disclosed therein.

[0401] In some embodiments, the antigen binding domain comprises a human antibody or a human antibody fragment that binds BCMA. In some embodiments, the antigen binding domain comprises one or more (for example, all three) LC CDR1, LC CDR2, and LC CDR3 of a human anti-BCMA binding domain described herein (for example, in Tables 2-14), and/or one or more (for example, all three) HC CDR1, HC CDR2, and HC CDR3 of a human anti-BCMA binding domain described herein (for example, in Tables 2-14). In some embodiments, the human anti-BCMA binding domain comprises a human VL described herein (for example, in Tables 2, 6, and 10) and/or a human VH described herein (for example, in Tables 2, 6, and 10). In some embodiments, the antigen binding domain is a scFv comprising a VL and a VH of an amino acid sequence of Tables 2, 6, and 10. In some embodiments, the antigen binding domain (for example, an scFv) comprises: a VL comprising an amino acid sequence having at least one, two or three modifications (for example, substitutions, for example, conservative substitutions) but not more than 30, 20 or 10 modifications (for example, substitutions, for example, conservative substitutions) of an amino acid sequence provided in Tables 2, 6, and 10, or a sequence with 95-99% identity with an amino acid sequence of Tables 2, 6, and 10; and/or a VH comprising an amino acid sequence having at least one, two or three modifications (for example, substitutions, for example, conservative substitutions) but not more than 30, 20 or 10 modifications (for example, substitutions, for example, conservative substitutions) of an amino acid sequence provided in Tables 2, 6, and 10, or a sequence with 95-99% identity to an amino acid sequence of Tables 2, 6, and 10.

[0402] In certain embodiments, the antigen binding domain described herein includes: (1) one, two, or three light chain (LC) CDRs chosen from:
[0403] (i) a LC CDR1 of SEQ ID NO: 54, LC CDR2 of SEQ ID NO: 55 and LC CDR3 of SEQ ID NO: 56; and/or
[0404] (2) one, two, or three heavy chain (HC) CDRs from one of the following:
   (i) a HC CDR1 of SEQ ID NO: 44, HC CDR2 of SEQ ID NO: 45 and HC CDR3 of SEQ ID NO: 84; (ii) a HC CDR1 of SEQ ID NO: 44, HC CDR2 of SEQ ID NO: 45 and HC CDR3 of SEQ ID NO: 46; (iii) a HC CDR1 of SEQ ID NO: 44, HC CDR2 of SEQ ID NO: 45 and HC CDR3 of SEQ ID NO: 68; or (iv) a HC CDR1 of SEQ ID NO: 44, HC CDR2 of SEQ ID NO: 45 and HC CDR3 of SEQ ID NO: 76.

[0405] In certain embodiments, the antigen binding domain described herein includes:
[0406] (1) one, two, or three light chain (LC) CDRs from one of the following: (i) a LC CDR1 of SEQ ID NO: 95, LC CDR2 of SEQ ID NO: 131 and LC CDR3 of SEQ ID NO: 132; (ii) a LC CDR1 of SEQ ID NO: 95, LC CDR2 of SEQ ID NO: 96 and LC CDR3 of SEQ ID NO: 97; (iii) a LC CDR1 of SEQ ID NO: 95, LC CDR2 of SEQ ID NO: 114 and LC CDR3 of SEQ ID NO: 115; or (iv) a LC CDR1 of SEQ ID NO: 95, LC CDR2 of SEQ ID NO: 114 and LC CDR3 of SEQ ID NO: 97; and/or
[0407] (2) one, two, or three heavy chain (HC) CDRs from one of the following: (i) a HC CDR1 of SEQ ID NO: 86, HC CDR2 of SEQ ID NO: 130 and HC CDR3 of SEQ ID NO: 88; (ii) a HC CDR1 of SEQ ID NO: 86, HC CDR2 of SEQ ID NO: 87 and HC CDR3 of SEQ ID NO: 88; or (iii) a HC CDR1 of SEQ ID NO: 86, HC CDR2 of SEQ ID NO: 109 and HC CDR3 of SEQ ID NO: 88.

[0408] In certain embodiments, the antigen binding domain described herein includes:
[0409] (1) one, two, or three light chain (LC) CDRs from one of the following: (i) a LC CDR1 of SEQ ID NO: 147, LC CDR2 of SEQ ID NO: 182 and LC CDR3 of SEQ ID NO: 183; (ii) a LC CDR1 of SEQ ID NO: 147, LC CDR2 of SEQ ID NO: 148 and LC CDR3 of SEQ ID NO: 149; or (iii) a LC CDR1 of SEQ ID NO: 147, LC CDR2 of SEQ ID NO: 170 and LC CDR3 of SEQ ID NO: 171; and/or
[0410] (2) one, two, or three heavy chain (HC) CDRs from one of the following: (i) a HC CDR1 of SEQ ID NO: 179, HC CDR2 of SEQ ID NO: 180 and HC CDR3 of SEQ ID NO: 181; (ii) a HC CDR1 of SEQ ID NO: 137, HC CDR2 of SEQ ID NO: 138 and HC CDR3 of SEQ ID NO: 139; or (iii) a HC CDR1 of SEQ ID NO: 160, HC CDR2 of SEQ ID NO: 161 and HC CDR3 of SEQ ID NO: 162.

[0411] In some embodiments, the HC CDR1, HC CDR2, HC CDR3, LC CDR1, LC CDR2, and LC CDR3 comprise the amino acid sequences of SEQ ID NOs: 44, 45, 84, 54, 55, and 56, respectively. In some embodiments, the HC CDR1, HC CDR2, HC CDR3, LC CDR1, LC CDR2, and LC CDR3 comprise the amino acid sequences of SEQ ID NOs: 44, 45, 46, 54, 55, and 56, respectively. In some embodiments, the HC CDR1, HC CDR2, HC CDR3, LC CDR1, LC CDR2, and LC CDR3 comprise the amino acid sequences of SEQ ID NOs: 44, 45, 68, 54, 55, and 56, respectively. In some embodiments, the HC CDR1, HC CDR2, HC CDR3, LC CDR1, LC CDR2, and LC CDR3 comprise the amino acid sequences of SEQ ID NOs: 44, 45, 76, 54, 55, and 56, respectively.

[0412] In some embodiments, the HC CDR1, HC CDR2, HC CDR3, LC CDR1, LC CDR2, and LC CDR3 comprise the amino acid sequences of SEQ ID NOs: 47, 48, 84, 57, 58, and 59, respectively. In some embodiments, the HC CDR1, HC CDR2, HC CDR3, LC CDR1, LC CDR2, and LC CDR3 comprise the amino acid sequences of SEQ ID NOs: 47, 48, 46, 57, 58, and 59, respectively. In some embodiments, the HC CDR1, HC CDR2, HC CDR3, LC CDR1, LC CDR2, and LC CDR3 comprise the amino acid sequences of SEQ ID NOs: 47, 48, 68, 57, 58, and 59, respectively. In some embodiments, the HC CDR1, HC CDR2, HC CDR3, LC CDR1, LC CDR2, and LC CDR3 comprise the amino acid sequences of SEQ ID NOs: 47, 48, 76, 57, 58, and 59, respectively.

[0413] In some embodiments, the HC CDR1, HC CDR2, HC CDR3, LC CDR1, LC CDR2, and LC CDR3 comprise the amino acid sequences of SEQ ID NOs: 49, 50, 85, 60, 58, and 56, respectively. In some embodiments, the HC CDR1, HC CDR2, HC CDR3, LC CDR1, LC CDR2, and LC CDR3 comprise the amino acid sequences of SEQ ID NOs: 49, 50, 51, 60, 58, and 56, respectively. In some embodiments, the HC CDR1, HC CDR2, HC CDR3, LC CDR1, LC CDR2, and LC CDR3 comprise the amino acid sequences of SEQ ID NOs: 49, 50, 69, 60, 58, and 56, respectively. In some embodiments, the HC CDR1, HC CDR2, HC CDR3, LC CDR1, LC CDR2, and LC CDR3 comprise the amino acid sequences of SEQ ID NOs: 49, 50, 77, 60, 58, and 56, respectively.

[0414] Other Exemplary Targets

[0415] Exemplary antigen binding domains that bind CD20 are described in WO2016/164731 and WO2018/067992, incorporated herein by reference. In some embodiments, the antigen binding domain of one or more of the CD20 antigen binding domains disclosed therein. Exemplary antigen binding domains that bind CD22 are described in WO2016/164731 and WO2018/067992, incorporated herein by reference.

[0416] In some embodiments, the antigen binding domain comprises a HC CDR1, a HC CDR2, and a HC CDR3 of any heavy chain binding domain amino acid sequences listed in Table 15. In embodiments, the antigen binding domain further comprises a LC CDR1, a LC CDR2, and a LC CDR3. In embodiments, the antigen binding domain comprises a LC CDR1, a LC CDR2, and a LC CDR3 amino acid sequences listed in Table 16.

[0417] In some embodiments, the antigen binding domain comprises one, two or all of LC CDR1, LC CDR2, and LC CDR3 of any light chain binding domain amino acid sequences listed in Table 16, and one, two or all of HC CDR1, HC CDR2, and HC CDR3 of any heavy chain binding domain amino acid sequences listed in Table 15.

[0418] Exemplary antigen binding domains that bind EGFRvIII are described in in WO2014/130657.

[0419] Exemplary antigen binding domains that bind CD123 are described in WO 2014/130635 and WO2016/028896, incorporated herein by reference.

[0420] In some embodiments, the antigen binding domain comprises a sequence from Tables 1-2 of WO2014/130635, incorporated herein by reference.

[0421] In some embodiments, the antigen binding domain comprises a sequence from Tables 2, 6, and 9 of WO2016/028896, incorporated herein by reference.

[0422] Exemplary antigen binding domains that bind CLL-1 are disclosed in WO2016/014535, incorporated herein by reference.

[0423] In some embodiments, the antigen binding domain comprises one, two three (for example, all three) heavy chain CDRs, HC CDR1, HC CDR2 and HC CDR3, from an antibody described herein (for example, an antibody described in WO2015/142675, US-2015-0283178-A1, US-2016-0046724-A1, US2014/0322212A1, US2016/0068601A1, US2016/0051651A1, US2016/0096892A1, US2014/0322275A1, or WO2015/090230, incorporated herein by reference), and/or one, two, three (for example, all three) light chain CDRs, LC CDR1, LC CDR2 and LC CDR3, from an antibody described herein (for example, an antibody described in WO2015/142675, US-2015-0283178-A1, US-2016-0046724-A1, US2014/0322212A1, US2016/0068601A1, US2016/0051651A1, US2016/0096892A1, US2014/0322275A1, or WO2015/090230, incorporated herein by reference). In some embodiments, the antigen binding domain comprises a heavy chain variable region and/or a variable light chain region of an antibody listed above.

[0424] In embodiments, the antigen binding domain is an antigen binding domain described in WO2015/142675, US-2015-0283178-A1, US-2016-0046724-A1, US2014/0322212A1, US2016/0068601A1, US2016/0051651A1, US2016/0096892A1, US2014/0322275A1, or WO2015/090230, incorporated herein by reference.

[0425] Exemplary target antigens that can be targeted using the CAR-expressing cells, include, but are not limited to, CD19, CD123, EGFRvIII, CD33, mesothelin, BCMA, and GFR ALPHA-4, among others, as described in, for example, WO2014/153270, WO 2014/130635, WO2016/028896, WO 2014/130657, WO2016/014576, WO 2015/090230, WO2016/014565, WO2016/014535, and WO2016/025880, each of which is herein incorporated by reference in its entirety.

[0426] In some embodiments, the antigen binding domain of any of the CARs described herein (for example, any of CD19, CD123, EGFRvIII, CD33, mesothelin, BCMA, and GFR ALPHA-4) comprises one, two three (for example, all three) heavy chain CDRs, HC CDR1, HC CDR2 and HC CDR3, from an antibody listed above, and/or one, two, three (for example, all three) light chain CDRs, LC CDR1, LC CDR2 and LC CDR3, from an antigen binding domain listed above. In some embodiments, the antigen binding domain comprises a heavy chain variable region and/or a variable light chain region of an antibody listed or described above.

[0427] In some embodiments, the antigen binding domain comprises one, two three (for example, all three) heavy chain CDRs, HC CDR1, HC CDR2 and HC CDR3, from an antibody listed above, and/or one, two, three (for example, all three) light chain CDRs, LC CDR1, LC CDR2 and LC CDR3, from an antibody listed above. In some embodiments, the antigen binding domain comprises a heavy chain variable region and/or a variable light chain region of an antibody listed or described above.

[0428] Bispecific CARs

[0429] In certain embodiments, the antigen binding domain is a bi- or multi-specific molecule (e.g., a multispecific antibody molecule). In some embodiments a multispecific antibody molecule is a bispecific antibody molecule. A bispecific antibody has specificity for no more than two antigens. A bispecific antibody molecule is characterized by a first immunoglobulin variable domain sequence which has binding specificity for a first epitope and a second immunoglobulin variable domain sequence that has binding specificity for a second epitope. In some embodiments the first and second epitopes are on the same antigen, e.g., the same protein (or subunit of a multimeric protein). In some embodiments the first and second epitopes overlap. In some embodiments the first and second epitopes do not overlap. In some embodiments the first and second epitopes are on different antigens, e.g., different proteins (or different subunits of a multimeric protein). In some embodiments a bispecific antibody molecule comprises a heavy chain variable domain sequence and a light chain variable domain sequence which have binding specificity for a first epitope and a heavy chain variable domain sequence and a light chain variable domain sequence which have binding specificity for a second epitope. In some embodiments a bispecific antibody molecule comprises a half antibody having binding specificity for a first epitope and a half antibody having binding specificity for a second epitope. In some embodiments a bispecific antibody molecule comprises a half antibody, or fragment thereof, having binding specificity for a first epitope and a half antibody, or fragment thereof, having binding specificity for a second epitope. In some embodiments a bispecific antibody molecule comprises a scFv, or fragment thereof, have binding specificity for a first epitope and a scFv, or fragment thereof, have binding specificity for a second epitope.

[0430] In some embodiments, the antibody molecule is a multi-specific (e.g., a bispecific or a trispecific) antibody molecule. Such molecules include bispecific fusion proteins, e.g., an expression construct containing two scFvs with a hydrophilic helical peptide linker between them and a full constant region, as described in, e.g., U.S. Pat. No. 5,637,481; minibody constructs with linked VL and VH chains further connected with peptide spacers to an antibody hinge region and CH3 region, which can be dimerized to form bispecific/multivalent molecules, as described in, e.g., U.S. Pat. No. 5,837,821; String of VH domains (or VL domains in family members) connected by peptide linkages with crosslinkable groups at the C-terminus further associated with VL domains to form a series of FVs (or scFvs), as described in, e.g., U.S. Pat. No. 5,864,019; and single chain binding polypeptides with both a VH and a VL domain linked through a peptide linker are combined into multivalent structures through non-covalent or chemical crosslinking to form, e.g., homobivalent, heterobivalent, trivalent, and tetravalent structures using both scFV or diabody type format, as described in, e.g., U.S. Pat. No. 5,869,620. The contents of the above-referenced applications are incorporated herein by reference in their entireties.

[0431] Within each antibody or antibody fragment (e.g., scFv) of a bispecific antibody molecule, the VH can be upstream or downstream of the VL. In some embodiments, the upstream antibody or antibody fragment (e.g., scFv) is arranged with its VH (VH1) upstream of its VL (VL1) and the downstream antibody or antibody fragment (e.g., scFv) is arranged with its VL (VL2) upstream of its VH (VH2), such that the overall bispecific antibody molecule has the arrangement VH1-VL1-VL2-VH2. In other embodiments, the upstream antibody or antibody fragment (e.g., scFv) is arranged with its VL (VL1) upstream of its VH (VH1) and the downstream antibody or antibody fragment (e.g., scFv) is arranged with its VH (VH2) upstream of its VL (VL2), such that the overall bispecific antibody molecule has the arrangement VL1-VH1-VH2-VL2. Optionally, a linker is disposed between the two antibodies or antibody fragments (e.g., scFvs), e.g., between VL1 and VL2 if the construct is arranged as VH1-VL1-VL2-VH2, or between VH1 and VH2 if the construct is arranged as VL1-VH1-VH2-VL2. The linker may be a linker as described herein, e.g., a (Gly4-Ser)n linker, wherein n is 1, 2, 3, 4, 5, or 6, preferably 4 (SEQ ID NO: 691). In general, the linker between the two scFvs should be long enough to avoid mispairing between the domains of the two scFvs. Optionally, a linker is disposed between the VL and VH of the first scFv. Optionally, a linker is disposed between the VL and VH of the second scFv. In constructs that have multiple linkers, any two or more of the linkers can be the same or different. Accordingly, in some embodiments, a bispecific CAR comprises VLs, VHs, and optionally one or more linkers in an arrangement as described herein.

[0432] Transmembrane Domains

[0433] With respect to the transmembrane domain, in various embodiments, a chimeric molecule as described herein (e.g., a CAR) can be designed to comprise a transmembrane domain that is attached to the extracellular domain of the chimeric molecule. A transmembrane domain can include one or more additional amino acids adjacent to the transmembrane region, e.g., one or more amino acid associated with the extracellular region of the protein from which the transmembrane was derived (e.g., 1, 2, 3, 4, 5, 6, 7, 8, 9, 10 up to 15 amino acids of the extracellular region) and/or one or more additional amino acids associated with the intracellular region of the protein from which the transmembrane protein is derived (e.g., 1, 2, 3, 4, 5, 6, 7, 8, 9, 10 up to 15 amino acids of the intracellular region). In some aspects, the transmembrane domain is one that is associated with one of the other domains of the chimeric protein (e.g., CAR) e.g., in some embodiments, the transmembrane domain may be from the same protein that the signaling domain, costimulatory domain or the hinge domain is derived from. In another aspect, the transmembrane domain is not derived from the same protein that any other domain of the chimeric protein (e.g., CAR) is derived from. In some instances, the transmembrane domain can be selected or modified by amino acid substitution to avoid binding of such domains to the transmembrane domains of the same or different surface membrane proteins, e.g., to minimize interactions with other members of the receptor complex. In some aspects, the transmembrane domain is capable of homodimerization with another CAR on the cell surface of a CAR-expressing cell. In a different aspect, the amino acid sequence of the transmembrane domain may be modified or substituted so as to minimize interactions with the binding domains of the native binding partner present in the same CAR-expressing cell.

[0434] The transmembrane domain may be derived either from a natural or from a recombinant source. Where the source is natural, the domain may be derived from any membrane-bound or transmembrane protein. In some aspects the transmembrane domain is capable of signaling to the intracellular domain(s) whenever the CAR has bound to a target. A transmembrane domain of particular use in this invention may include at least the transmembrane region(s) of e.g., the alpha, beta or zeta chain of the T-cell receptor, CD28, CD27, CD3 epsilon, CD45, CD4, CD5, CD8, CD9, CD16, CD22, CD33, CD37, CD64, CD80, CD86, CD134, CD137, CD154. In some embodiments, a transmembrane domain may include at least the transmembrane region(s) of, e.g., KIRDS2, OX40, CD2, CD27, LFA-1 (CD11a, CD18), ICOS (CD278), 4-1BB (CD137), GITR, CD40, BAFFR, HVEM (LIGHTR), SLAMF7, NKp80 (KLRF1), NKp44, NKp30, NKp46, CD160, CD19, IL2R beta, IL2R gamma, IL7R a, ITGA1, VLA1, CD49a, ITGA4, IA4, CD49D, ITGA6, VLA-6, CD49f, ITGAD, CD11 d, ITGAE, CD103, ITGAL, CD11 a, LFA-1, ITGAM, CD11b, ITGAX, CD11 c, ITGB1, CD29, ITGB2, CD18, LFA-1, ITGB7, TNFR2, DNAM1 (CD226), SLAMF4 (CD244, 2B4), CD84, CD96 (Tactile), CEACAM1, CRTAM, Ly9 (CD229), CD160 (BY55), PSGL1, CD100 (SEMA4D), SLAMF6 (NTB-A, Ly108), SLAM (SLAMF1, CD150, IPO-3), BLAME (SLAMF8), SELPLG (CD162), LTBR, PAG/Cbp, NKG2D, or NKG2C.

[0435] In some instances, the transmembrane domain can be attached to the extracellular region of the CAR, e.g., the antigen binding domain of the CAR, via a hinge, e.g., a hinge from a human protein. For example, in some embodiments, the hinge can be a human Ig (immunoglobulin) hinge (e.g., an IgG4 hinge, an IgD hinge), a GS linker (e.g., a GS linker described herein), a KIR2DS2 hinge or a CD8a hinge. In some embodiments, the hinge or spacer comprises (e.g., consists of) the amino acid sequence of SEQ ID NO:4. In some aspects, the transmembrane domain comprises (e.g., consists of) a transmembrane domain of SEQ ID NO: 12.

[0436] In some embodiments, the encoded transmembrane domain comprises an amino acid sequence of a CD8 transmembrane domain having at least one, two or three modifications but not more than 20, 10 or 5 modifications of an amino acid sequence of SEQ ID NO: 12, or a sequence with 95-99% identity to an amino acid sequence of SEQ ID NO: 12. In some embodiments, the encoded transmembrane domain comprises the sequence of SEQ ID NO: 12.

[0437] In other embodiments, the nucleic acid molecule encoding the CAR comprises a nucleotide sequence of a CD8 transmembrane domain, e.g., comprising the sequence of SEQ ID NO: 13, or a sequence with 95-99% identity thereof.

[0438] In some embodiments, the encoded antigen binding domain is connected to the transmembrane domain by a hinge region. In some embodiments, the encoded hinge region comprises the amino acid sequence of a CD8 hinge, e.g., SEQ ID NO: 4; or the amino acid sequence of an IgG4 hinge, e.g., SEQ ID NO: 6, or a sequence with 95-99% identity to SEQ ID NO:4 or 6. In other embodiments, the nucleic acid sequence encoding the hinge region comprises a sequence of SEQ ID NO: 5 or SEQ ID NO: 7, corresponding to a CD8 hinge or an IgG4 hinge, respectively, or a sequence with 95-99% identity to SEQ ID NO:5 or 7.

[0439] In some aspects, the hinge or spacer comprises an IgG4 hinge. For example, in some embodiments, the hinge or spacer comprises a hinge of the amino acid sequence ESKYGPPCPPCPAPEFLGGPSVFLFPPKPKDTLMISRTPEVTCVVVDVSQEDPEVQFNWY VDGVEVHNAKTKPREEQFNSTYRVVSVLTVLHQDWLNGKEYKCKVSNKGLPSSIEKTIS KAKGQPREPQVYTLPPSQEEMTKNQVSLTCLVKGFYPSDIAVEWESNGQPENNYKTTPP VLDSDGSFFLYSRLTVDKSRWQEGNVFSCSVMHEALHNHYTQKSLSLSLGKM (SEQ ID NO:6). In some embodiments, the hinge or spacer comprises a hinge encoded by a nucleotide sequence of

(SEQ ID NO: 7)
GAGAGCAAGTACGGCCCTCCCTGCCCCCCTTGCCCTGCCCCCGAGTTCCT
GGGCGGACCCAGCGTGTTCCTGTTCCCCCCCAAGCCCAAGGACACCCTGA
TGATCAGCCGGACCCCCGAGGTGACCTGTGTGGTGGTGGACGTGTCCCAG
GAGGACCCCGAGGTCCAGTTCAACTGGTACGTGGACGGCGTGGAGGTGCA
CAACGCCAAGACCAAGCCCCGGGAGGAGCAGTTCAATAGCACCTACCGGG
TGGTGTCCGTGCTGACCGTGCTGCACCAGGACTGGCTGAACGGCAAGGAA
TACAAGTGTAAGGTGTCCAACAAGGGCCTGCCCAGCAGCATCGAGAAAAC
CATCAGCAAGGCCAAGGGCCAGCCTCGGGAGCCCCAGGTGTACACCCTGC
CCCCTAGCCAAGAGGAGATGACCAAGAACCAGGTGTCCCTGACCTGCCTG
GTGAAGGGCTTCTACCCCAGCGACATCGCCGTGGAGTGGGAGAGCAACGG
CCAGCCCGAGAACAACTACAAGACCACCCCCCCTGTGCTGGACAGCGACG
GCAGCTTCTTCCTGTACAGCCGGCTGACCGTGGACAAGAGCCGGTGGCAG
GAGGGCAACGTCTTTAGCTGCTCCGTGATGCACGAGGCCCTGCACAACCA
CTACACCCAGAAGAGCCTGAGCCTGTCCCTGGGCAAGATG.

[0440] In some aspects, the hinge or spacer comprises an IgD hinge. For example, in some embodiments, the hinge or spacer comprises a hinge of the amino acid sequence RWPESPKAQASSVPTAQPQAEGSLAKATTAPATTRNTGRGGEEKKKEKEKEEQEERETK TPECPSHTQPLGVYLLTPAVQDLWLRDKATFTCFVVGSDLKDAHLTWEVAGKVPTGGV EEGLLERHSNGSQSQHSRLTLPRSLWNAGTSVTCTLNHPSLPPQRLMALREPAAQAPVK LSLNLLASSDPPEAASWLLCEVSGFSPPNILLMWLEDQREVNTSGFAPARPPPQPGSTTF WAWSVLRVPAPPSPQPATYTCVVSHEDSRTLLNASRSLEVSYVTDH (SEQ ID NO:8). In some embodiments, the hinge or spacer comprises a hinge encoded by a nucleotide sequence of

(SEQ ID NO: 9)
AGGTGGCCCGAAAGTCCCAAGGCCCAGGCATCTAGTGTTCCTACTGCACA
GCCCCAGGCAGAAGGCAGCCTAGCCAAAGCTACTACTGCACCTGCCACTA
CGCGCAATACTGGCCGTGGCGGGGAGGAGAAGAAAAAGGAGAAAGAGAAA
GAAGAACAGGAAGAGAGGGAGACCAAGACCCCTGAATGTCCATCCCATAC
CCAGCCGCTGGGCGTCTATCTCTTGACTCCCGCAGTACAGGACTTGTGGC
TTAGAGATAAGGCCACCTTTACATGTTTCGTCGTGGGCTCTGACCTGAAG
GATGCCCATTTGACTTGGGAGGTTGCCGGAAAGGTACCCACAGGGGGGGT
TGAGGAAGGGTTGCTGGAGCGCCATTCCAATGGCTCTCAGAGCCAGCACT
CAAGACTCACCCTTCCGAGATCCCTGTGGAACGCCGGGACCTCTGTCACA
TGTACTCTAAATCATCCTAGCCTGCCCCCACAGCGTCTGATGGCCCTTAG
AGAGCCAGCCGCCCAGGCACCAGTTAAGCTTAGCCTGAATCTGCTCGCCA
GTAGTGATCCCCCAGAGGCCGCCAGCTGGCTCTTATGCGAAGTGTCCGGC
TTTAGCCCGCCCAACATCTTGCTCATGTGGCTGGAGGACCAGCGAGAAGT
GAACACCAGCGGCTTCGCTCCAGCCCGGCCCCCACCCCAGCCGGGTTCTA
CCACATTCTGGGCCTGGAGTGTCTTAAGGGTCCCAGCACCACCTAGCCCC
CAGCCAGCCACATACACCTGTGTTGTGTCCCATGAAGATAGCAGGACCCT
GCTAAATGCTTCTAGGAGTCTGGAGGTTTCCTACGTGACTGACCATT

[0441] In some aspects, the transmembrane domain may be recombinant, in which case it will comprise predominantly hydrophobic residues such as leucine and valine. In some aspects a triplet of phenylalanine, tryptophan and valine can be found at each end of a recombinant transmembrane domain.

[0442] Optionally, a short oligo- or polypeptide linker, between 2 and 10 amino acids in length may form the linkage between the transmembrane domain and the cytoplasmic region of the CAR. A glycine-serine doublet provides a particularly suitable linker. For example, in some aspects, the linker comprises the amino acid sequence of GGGGSGGGGS (SEQ ID NO:10). In some embodiments, the linker is encoded by a nucleotide sequence of GGTGGCGGAGGTTCTGGAGGTGGAGGTTCC (SEQ ID NO: 11). In some embodiments, the linker comprises the amino acid sequence of GGGGS (SEQ ID NO: 877). In some embodiments the linker is encoded by a nucleotide sequence of SEQ ID NO: 876).

[0443] In some aspects, the hinge or spacer comprises a KIR2DS2 hinge.

[0444] Signaling Domains

[0445] In embodiments of the invention having an intracellular signaling domain, such a domain can contain, e.g., one or more of a primary signaling domain and/or a costimulatory signaling domain. In some embodiments, the intracellular signaling domain comprises a sequence encoding a primary signaling domain. In some embodiments, the intracellular signaling domain comprises a costimulatory signaling domain. In some embodiments, the intracellular signaling domain comprises a primary signaling domain and a costimulatory signaling domain.

[0446] The intracellular signaling sequences within the cytoplasmic portion of the CAR of the invention may be linked to each other in a random or specified order. Optionally, a short oligo-or polypeptide linker, for example, between 2 and 10 amino acids (e.g., 2, 3, 4, 5, 6, 7, 8, 9, or 10 amino acids) in length may form the linkage between intracellular signaling sequences. In some embodiments, a glycine-serine doublet can be used as a suitable linker. In some embodiments, a single amino acid, e.g., an alanine, a glycine, can be used as a suitable linker.

[0447] In some aspects, the intracellular signaling domain is designed to comprise two or more, e.g., 2, 3, 4, 5, or more, costimulatory signaling domains. In some embodiments, the two or more, e.g., 2, 3, 4, 5, or more, costimulatory signaling domains, are separated by a linker molecule, e.g., a linker molecule described herein. In some embodiments, the intracellular signaling domain comprises two costimulatory signaling domains. In some embodiments, the linker molecule is a glycine residue. In some embodiments, the linker is an alanine residue.

[0448] Primary Signaling Domains

[0449] A primary signaling domain regulates primary activation of the TCR complex either in a stimulatory way, or in an inhibitory way. Primary intracellular signaling domains that act in a stimulatory manner may contain signaling motifs which are known as immunoreceptor tyrosine-based activation motifs or ITAMs. In CARs such domains are used for the same purpose. Examples of ITAM containing primary intracellular signaling domains that are of particular use in the invention include those of CD3 zeta, common FcR gamma (FCERIG), Fc gamma RIIa, FcR beta (Fc Epsilon Rib), CD3 gamma, CD3 delta, CD3 epsilon, CD79a, CD79b, DAP10, and DAP12. In some embodiments, a CAR of the invention comprises an intracellular signaling domain, e.g., a primary signaling domain of CD3-zeta.

[0450] In some embodiments, the encoded primary signaling domain comprises a functional signaling domain of CD3 zeta. The encoded CD3 zeta primary signaling domain can comprise an amino acid sequence having at least one, two or three modifications but not more than 20, 10 or 5 modifications of an amino acid sequence of SEQ ID NO: 18 or SEQ ID NO: 20, or a sequence with 95-99% identity to an amino acid sequence of SEQ ID NO: 18 or SEQ ID NO: 20. In some embodiments, the encoded primary signaling domain comprises a sequence of SEQ ID NO:18 or SEQ ID NO: 20. In other embodiments, the nucleic acid sequence encoding the primary signaling domain comprises a sequence of SEQ ID NO:19 or SEQ ID NO: 21, or a sequence with 95-99% identity thereof.

[0451] Costimulatory Signaling Domains

[0452] In some embodiments, the encoded intracellular signaling domain comprises a costimulatory signaling domain. For example, the intracellular signaling domain can comprise a primary signaling domain and a costimulatory signaling domain. In some embodiments, the encoded costimulatory signaling domain comprises a functional signaling domain of a protein chosen from one or more of CD27, CD28, 4-1BB (CD137), OX40, CD30, CD40, PD-1, ICOS, lymphocyte function-associated antigen-1 (LFA-1), CD2, CD7, LIGHT, NKG2C, B7-H3, a ligand that specifically binds with CD83, CDS, ICAM-1, GITR, BAFFR, HVEM (LIGHTR), SLAMF7, NKp80 (KLRF1), CD160, CD19, CD4, CD8alpha, CD8beta, IL2R beta, IL2R gamma, IL7R alpha, ITGA4, VLA1, CD49a, ITGA4, IA4, CD49D, ITGA6, VLA-6, CD49f, ITGAD, CD11d, ITGAE, CD103, ITGAL, CD11a, LFA-1, ITGAM, CD11b, ITGAX, CD11c, ITGB1, CD29, ITGB2, CD18, LFA-1, ITGB7, TNFR2, TRANCE/RANKL, DNAM1 (CD226), SLAMF4 (CD244, 2B4), CD84, CD96 (Tactile), CEACAM1, CRTAM, Ly9 (CD229), CD160 (BY55), PSGL1, CD100 (SEMA4D), CD69, SLAMF6 (NTB-A, Ly108), SLAM (SLAMF1, CD150, IPO-3), BLAME (SLAMF8), SELPLG (CD162), LTBR, LAT, GADS, SLP-76, PAG/Cbp, NKp44, NKp30, NKp46, and NKG2D.

[0453] In some embodiments, the encoded costimulatory signaling domain comprises an amino acid sequence having at least one, two or three modifications but not more than 20, 10 or 5 modifications of an amino acid sequence of SEQ ID NO:14 or SEQ ID NO: 16, or a sequence with 95-99% identity to an amino acid sequence of SEQ ID NO:14 or SEQ ID NO: 16. In some embodiments, the encoded costimulatory signaling domain comprises a sequence of SEQ ID NO: 14 or SEQ ID NO: 16. In other embodiments, the nucleic acid sequence encoding the costimulatory signaling domain comprises a sequence of SEQ ID NO:15 or SEQ ID NO: 17, or a sequence with 95-99% identity thereof.

[0454] In other embodiments, the encoded intracellular domain comprises the sequence of SEQ ID NO: 14 or SEQ ID NO: 16, and the sequence of SEQ ID NO: 18 or SEQ ID NO: 20, wherein the sequences comprising the intracellular signaling domain are expressed in the same frame and as a single polypeptide chain.

[0455] In some embodiments, the nucleic acid sequence encoding the intracellular signaling domain comprises a sequence of SEQ ID NO:15 or SEQ ID NO: 17, or a sequence with 95-99% identity thereof, and a sequence of SEQ ID NO:19 or SEQ ID NO:21, or a sequence with 95-99% identity thereof.

[0456] In some embodiments, the nucleic acid molecule further encodes a leader sequence. In some embodiments, the leader sequence comprises the sequence of SEQ ID NO: 2.

In some aspects, the intracellular signaling domain is designed to comprise the signaling domain of CD3-zeta and the signaling domain of CD28. In some aspects, the intracellular signaling domain is designed to comprise the signaling domain of CD3-zeta and the signaling domain of 4-1BB. In some aspects, the signaling domain of 4-1BB is a signaling domain of SEQ ID NO: 14. In some aspects, the signaling domain of CD3-zeta is a signaling domain of SEQ ID NO: 18.

[0457] In some aspects, the intracellular signaling domain is designed to comprise the signaling domain of CD3-zeta and the signaling domain of CD27. In some aspects, the signaling domain of CD27 comprises an amino acid sequence of QRRKYRSNKGESPVEPAEPCRYSCPREEEGSTIPIQEDYRKPEPACSP (SEQ ID NO:16). In some aspects, the signaling domain of CD27 is encoded by a nucleic acid sequence of

(SEQ ID NO: 17)
AGGAGTAAGAGGAGCAGGCTCCTGCACAGTGACTACATGAACATGACTCC
CCGCCGCCCCGGGCCCACCCGCAAGCATTACCAGCCCTATGCCCCACCAC
GCGACTTCGCAGCCTATCGCTCC

[0458] Inhibitory Domains

[0459] In some embodiments, the vector comprises a nucleic acid sequence that encodes a CAR, e.g., a CAR described herein, and a nucleic acid sequence that encodes an inhibitory molecule comprising: an inhKIR cytoplasmic domain; a transmembrane domain, e.g., a KIR transmembrane domain; and an inhibitor cytoplasmic domain, e.g., an ITIM domain, e.g., an inhKIR ITIM domain. In some embodiments the inhibitory molecule is a naturally occurring inhKIR, or a sequence sharing at least 50, 60, 70, 80, 85, 90, 95, or 99% homology with, or that differs by no more than 1, 2, 3, 4, 5, 6, 7, 8, 9, 10, 15, or 20 residues from, a naturally occurring inhKIR.

[0460] In some embodiments, the nucleic acid sequence that encodes an inhibitory molecule comprises: a SLAM family cytoplasmic domain; a transmembrane domain, e.g., a SLAM family transmembrane domain; and an inhibitor cytoplasmic domain, e.g., a SLAM family domain, e.g., an SLAM family ITIM domain. In some embodiments the inhibitory molecule is a naturally occurring SLAM family member, or a sequence sharing at least 50, 60, 70, 80, 85, 90, 95, or 99% homology with, or that differs by no more than 1, 2, 3, 4, 5, 6, 7, 8, 9, 10, 15, or 20 residues from, a naturally occurring SLAM family member.

[0461] In some embodiments, the vector is an in vitro transcribed vector, e.g., a vector that transcribes RNA of a nucleic acid molecule described herein. In some embodiments, the nucleic acid sequence in the vector further comprises a poly(A) tail, e.g., a poly A tail. In some embodiments, the nucleic acid sequence in the vector further comprises a 3′UTR, e.g., a 3′ UTR described herein, e.g., comprising at least one repeat of a 3′UTR derived from human beta-globulin. In some embodiments, the nucleic acid sequence in the vector further comprises promoter, e.g., a T2A promoter.

[0462] Promoters

[0463] In some embodiments, the vector further comprises a promoter. In some embodiments, the promoter is chosen from an EF-1 promoter, a CMV IE gene promoter, an EF-1a promoter, an ubiquitin C promoter, or a phosphoglycerate kinase (PGK) promoter. In some embodiments, the promoter is an EF-1 promoter. In some embodiments, the EF-1 promoter comprises a sequence of SEQ ID NO: 1.

[0464] In some aspects of the present invention, immune effector cells, e.g., T cells, can be obtained from a unit of blood collected from a subject using any number of techniques known to the skilled artisan, such as Ficoll™ separation. In some aspects, cells from the circulating blood of an individual are obtained by apheresis. The apheresis product typically contains lymphocytes, including T cells, monocytes, granulocytes, B cells, other nucleated white blood cells, red blood cells, and platelets. In some aspects, the cells collected by apheresis may be washed to remove the plasma fraction and, optionally, to suspend the cells in a buffer or medium for subsequent processing steps. In some embodiments, the cells are washed with phosphate buffered saline (PBS). In an alternative embodiment, the wash solution lacks calcium and may lack magnesium or may lack many if not all divalent cations.

TABLE 17
Sequences of various components of CAR (aa - amino acids, na - nucleic acids
that encodes the corresponding protein)

| SEQ | | |
|---|---|---|
| ID | | |
| NO | description | Sequence |
| 1 | EF-1 | CGTGAGGCTCCGGTGCCCGTCAGTGGGCAGAGCGCACATCG |
| | promoter | CCCACAGTCCCCGAGAAGTTGGGGGGAGGGGTCGGCAATTG |
| | | AACCGGTGCCTAGAGAAGGTGGCGCGGGGTAAACTGGGAAA |
| | | GTGATGTCGTGTACTGGCTCCGCCTTTTTCCCGAGGGTGGGG |
| | | GAGAACCGTATATAAGTGCAGTAGTCGCCGTGAACGTTCTTT |
| | | TTCGCAACGGGTTTGCCGCCAGAACACAGGTAAGTGCCGTGT |
| | | GTGGTTCCCGCGGGCCTGGCCTCTTTACGGGTTATGGCCCTT |
| | | GCGTGCCTTGAATTACTTCCACCTGGCTGCAGTACGTGATTC |
| | | TTGATCCCGAGCTTCGGGTTGGAAGTGGGTGGGAGAGTTCG |
| | | AGGCCTTGCGCTTAAGGAGCCCCTTCGCCTCGTGCTTGAGTT |
| | | GAGGCCTGGCCTGGGCGCTGGGGCCGCCGCGTGCGAATCTG |
| | | GTGGCACCTTCGCGCCTGTCTCGCTGCTTTCGATAAGTCTCTA |
| | | GCCATTTAAAATTTTTGATGACCTGCTGCGACGCTTTTTTTCT |
| | | GGCAAGATAGTCTTGTAAATGCGGGCCAAGATCTGCACACT |
| | | GGTATTTCGGTTTTTGGGGCCGCGGGCGGCGACGGGGCCCGT |
| | | GCGTCCCAGCGCACATGTTCGGCGAGGCGGGGCCTGCGAGC |
| | | GCGGCCACCGAGAATCGGACGGGGGTAGTCTCAAGCTGGCC |
| | | GGCCTGCTCTGGTGCCTGGCCTCGCGCCGCCGTGTATCGCCC |
| | | CGCCCTGGGCGGCAAGGCTGGCCCGGTCGGCACCAGTTGCG |
| | | TGAGCGGAAAGATGGCCGCTTCCCGGCCCTGCTGCAGGGAG |
| | | CTCAAAATGGAGGACGCGGCGCTCGGGAGAGCGGGCGGGTG |
| | | AGTCACCCACACAAAGGAAAAGGGCCTTTCCGTCCTCAGCC |
| | | GTCGCTTCATGTGACTCCACGGAGTACCGGGCGCCGTCCAGG |
| | | CACCTCGATTAGTTCTCGAGCTTTTGGAGTACGTCGTCTTTAG |
| | | GTTGGGGGGAGGGGTTTTATGCGATGGAGTTTCCCCACACTG |
| | | AGTGGGTGGAGACTGAAGTTAGGCCAGCTTGGCACTTGATG |
| | | TAATTCTCCTTGGAATTTGCCCTTTTTGAGTTTGGATCTTGGT |
| | | TCATTCTCAAGCCTCAGACAGTGGTTCAAAGTTTTTTTCTTCC |
| | | ATTTCAGGTGTCGTGA |
| 2 | Leader (aa) | MALPVTALLLPLALLLHAARP |
| 3 | Leader (na) | ATGGCCCTGCCTGTGACAGCCCTGCTGCTGCCTCTGGCTCTG |
| | | CTGCTGCATGCCGCTAGACCC |
| 4 | CD 8 hinge | TTTPAPRPPTPAPTIASQPLSLRPEACRPAAGGAVHTRGLDFACD |
| | (aa) | |
| 5 | CD8 hinge | ACCACGACGCCAGCGCCGCGACCACCAACACCGGCGCCCAC |
| | (na) | CATCGCGTCGCAGCCCCTGTCCCTGCGCCCAGAGGCGTGCCG |
| | | GCCAGCGGCGGGGGGCGCAGTGCACACGAGGGGGCTGGACT |
| | | TCGCCTGTGAT |
| 6 | Ig4 hinge | ESKYGPPCPPCPAPEFLGGPSVFLFPPKPKDTLMISRTPEVTCVV |
| | (aa) | VDVSQEDPEVQFNWYVDGVEVHNAKTKPREEQFNSTYRVVSV |
| | | LTVLHQDWLNGKEYKCKVSNKGLPSSIEKTISKAKGQPREPQV |
| | | YTLPPSQEEMTKNQVSLTCLVKGFYPSDIAVEWESNGQPENNY |
| | | KTTPPVLDSDGSFFLYSRLTVDKSRWQEGNVFSCSVMHEALHN |
| | | HYTQKSLSLSLGKM |
| 7 | Ig4 hinge | GAGAGCAAGTACGGCCCTCCCTGCCCCCCTTGCCCTGCCCCC |
| | (na) | GAGTTCCTGGGCGGACCCAGCGTGTTCCTGTTCCCCCCCAAG |
| | | CCCAAGGACACCCTGATGATCAGCCGGACCCCCGAGGTGAC |
| | | CTGTGTGGTGGTGGACGTGTCCCAGGAGGACCCCGAGGTCC |
| | | AGTTCAACTGGTACGTGGACGGCGTGGAGGTGCACAACGCC |
| | | AAGACCAAGCCCCGGGAGGAGCAGTTCAATAGCACCTACCG |
| | | GGTGGTGTCCGTGCTGACCGTGCTGCACCAGGACTGGCTGAA |
| | | CGGCAAGGAATACAAGTGTAAGGTGTCCAACAAGGGCCTGC |
| | | CCAGCAGCATCGAGAAAACCATCAGCAAGGCCAAGGGCCAG |
| | | CCTCGGGAGCCCCAGGTGTACACCCTGCCCCCTAGCCAAGA |
| | | GGAGATGACCAAGAACCAGGTGTCCCTGACCTGCCTGGTGA |
| | | AGGGCTTCTACCCCAGCGACATCGCCGTGGAGTGGGAGAGC |
| | | AACGGCCAGCCCGAGAACAACTACAAGACCACCCCCCCTGT |
| | | GCTGGACAGCGACGGCAGCTTCTTCCTGTACAGCCGGCTGAC |
| | | CGTGGACAAGAGCCGGTGGCAGGAGGGCAACGTCTTTAGCT |
| | | GCTCCGTGATGCACGAGGCCCTGCACAACCACTACACCCAG |
| | | AAGAGCCTGAGCCTGTCCCTGGGCAAGATG |
| 8 | IgD hinge | RWPESPKAQASSVPTAQPQAEGSLAKATTAPATTRNTGRGGEE |
| | (aa) | KKKEKEKEEQEERETKTPECPSHTQPLGVYLLTPAVQDLWLRD |
| | | KATFTCFVVGSDLKDAHLTWEVAGKVPTGGVEEGLLERHSNG |
| | | SQSQHSRLTLPRSLWNAGTSVTCTLNHPSLPPQRLMALREPAA |
| | | QAPVKLSLNLLASSDPPEAASWLLCEVSGFSPPNILLMWLEDQR |
| | | EVNTSGFAPARPPPQPGSTTFWAWSVLRVPAPPSPQPATYTCVV |
| | | SHEDSRTLLNASRSLEVSYVTDH |
| 9 | IgD hinge | AGGTGGCCCGAAAGTCCCAAGGCCCAGGCATCTAGTGTTCCT |
| | (na) | ACTGCACAGCCCCAGGCAGAAGGCAGCCTAGCCAAAGCTAC |
| | | TACTGCACCTGCCACTACGCGCAATACTGGCCGTGGCGGGG |
| | | AGGAGAAGAAAAAGGAGAAAGAGAAAGAAGAACAGGAAG |
| | | AGAGGGAGACCAAGACCCCTGAATGTCCATCCCATACCCAG |
| | | CCGCTGGGCGTCTATCTCTTGACTCCCGCAGTACAGGACTTG |
| | | TGGCTTAGAGATAAGGCCACCTTTACATGTTTCGTCGTGGGC |
| | | TCTGACCTGAAGGATGCCCATTTGACTTGGGAGGTTGCCGGA |
| | | AAGGTACCCACAGGGGGGGTTGAGGAAGGGTTGCTGGAGCG |
| | | CCATTCCAATGGCTCTCAGAGCCAGCACTCAAGACTCACCCT |
| | | TCCGAGATCCCTGTGGAACGCCGGGACCTCTGTCACATGTAC |
| | | TCTAAATCATCCTAGCCTGCCCCCACAGCGTCTGATGGCCCT |
| | | TAGAGAGCCAGCCGCCCAGGCACCAGTTAAGCTTAGCCTGA |
| | | ATCTGCTCGCCAGTAGTGATCCCCCAGAGGCCGCCAGCTGGC |
| | | TCTTATGCGAAGTGTCCGGCTTTAGCCCGCCCAACATCTTGC |
| | | TCATGTGGCTGGAGGACCAGCGAGAAGTGAACACCAGCGGC |
| | | TTCGCTCCAGCCCGGCCCCCACCCCAGCCGGGTTCTACCACA |
| | | TTCTGGGCCTGGAGTGTCTTAAGGGTCCCAGCACCACCTAGC |
| | | CCCCAGCCAGCCACATACACCTGTGTTGTGTCCCATGAAGAT |
| | | AGCAGGACCCTGCTAAATGCTTCTAGGAGTCTGGAGGTTTCC |
| | | TACGTGACTGACCATT |
| 10 | GS | GGGGSGGGGS |
| | hinge/linker | |
| | (aa) | |
| 11 | GS | GGTGGCGGAGGTTCTGGAGGTGGAGGTTCC |
| | hinge/linker | |
| | (na) | |
| 12 | CD8 TM | IYIWAPLAGTCGVLLLSLVITLYC |
| | (aa) | |
| 13 | CD8 TM | ATCTACATCTGGGCGCCCTTGGCCGGGACTTGTGGGGTCCTT |
| | (na) | CTCCTGTCACTGGTTATCACCCTTTACTGC |
| 14 | 4-1BB | KRGRKKLLYIFKQPFMRPVQTTQEEDGCSCRFPEEEEGGCEL |
| | intracellular | |
| | domain (aa) | |
| 15 | 4-1BB | AAACGGGGCAGAAAGAAACTCCTGTATATATTCAAACAACC |
| | intracellular | ATTTATGAGACCAGTACAAACTACTCAAGAGGAAGATGGCT |
| | domain (na) | GTAGCTGCCGATTTCCAGAAGAAGAAGAAGGAGGATGTGAA |
| | | CTG |
| 16 | CD27 (aa) | QRRKYRSNKGESPVEPAEPCRYSCPREEEGSTIPIQEDYRKPEPA |
| | | CSP |
| 17 | CD27 (na) | AGGAGTAAGAGGAGCAGGCTCCTGCACAGTGACTACATGAA |
| | | CATGACTCCCCGCCGCCCCGGGCCCACCCGCAAGCATTACCA |
| | | GCCCTATGCCCCACCACGCGACTTCGCAGCCTATCGCTCC |
| 18 | CD3-zeta | RVKFSRSADAPAYKQGQNQLYNELNLGRREEYDVLDKRRGRD |
| | (aa) | PEMGGKPRRKNPQEGLYNELQKDKMAEAYSEIGMKGERRRGK |
| | | GHDGLYQGLSTATKDTYDALHMQALPPR |
| 19 | CD3-zeta | AGAGTGAAGTTCAGCAGGAGCGCAGACGCCCCCGCGTACAA |
| | (na) | GCAGGGCCAGAACCAGCTCTATAACGAGCTCAATCTAGGAC |
| | | GAAGAGAGGAGTACGATGTTTTGGACAAGAGACGTGGCCGG |
| | | GACCCTGAGATGGGGGGAAAGCCGAGAAGGAAGAACCCTC |
| | | AGGAAGGCCTGTACAATGAACTGCAGAAAGATAAGATGGCG |
| | | GAGGCCTACAGTGAGATTGGGATGAAAGGCGAGCGCCGGAG |
| | | GGGCAAGGGGCACGATGGCCTTTACCAGGGTCTCAGTACAG |
| | | CCACCAAGGACACCTACGACGCCCTTCACATGCAGGCCCTG |
| | | CCCCCTCGC |
| 20 | CD3-zeta | RVKFSRSADAPAYQQGQNQLYNELNLGRREEYDVLDKRRGRD |
| | (aa) | PEMGGKPRRKNPQEGLYNELQKDKMAEAYSEIGMKGERRRGK |
| | | GHDGLYQGLSTATKDTYDALHMQALPPR |
| 21 | CD3-zeta | AGAGTGAAGTTCAGCAGGAGCGCAGACGCCCCCGCGTACCA |
| | (na) | GCAGGGCCAG |
| | | AACCAGCTCTATAACGAGCTCAATCTAGGACGAAGAGAGGA |
| | | GTACGATGTTT |
| | | TGGACAAGAGACGTGGCCGGGACCCTGAGATGGGGGGAAA |
| | | GCCGAGAAGGA |
| | | AGAACCCTCAGGAAGGCCTGTACAATGAACTGCAGAAAGAT |
| | | AAGATGGCGG |
| | | AGGCCTACAGTGAGATTGGGATGAAAGGCGAGCGCCGGAGG |
| | | GGCAAGGGGC |
| | | ACGATGGCCTTTACCAGGGTCTCAGTACAGCCACCAAGGAC |
| | | ACCTACGACGC |
| | | CCTTCACATGCAGGCCCTGCCCCCTCGC |
| 22 | linker | GGGGS |
| 23 | linker | GGTGGCGGAGGTTCTGGAGGTGGAGGTTCC |
| 24 | PD-1 | Pgwfldspdrpwnpptfspallvvtegdnatftcsfsntsesfvlnwyrmspsnqtdklaafpedr |
| | extracellular | sqpgqdcrfrvtqlpngrdfhmsvvrarrndsgtylcgaislapkaqikeslraelrvterraevpta |
| | domain (aa) | hpspsprpagqfqtlv |
| 25 | PD-1 | Cccggatggtttctggactctccggatcgcccgtggaatcccccaaccttctcaccggcactcttggt |
| | extracellular | tgtgactgagggcgataatgcgaccttcacgtgctcgttctccaacacctccgaatcattcgtgctgaa |
| | domain (na) | ctggtaccgcatgagcccgtcaaaccagaccgacaagctcgccgcgtttccggaagatcggtcgca |
| | | accgggacaggattgtcggttccgcgtgactcaactgccgaatggcagagacttccacatgagcgt |
| | | ggtccgcgctaggcgaaacgactccgggacctacctgtgcggagccatctcgctggcgcctaagg |
| | | cccaaatcaaagagagcttgagggccgaactgagagtgaccgagcgcagagctgaggtgccaact |
| | | gcacatccatccccatcgcctcggcctgcggggcagtttcagaccctggtc |
| 26 | PD-1 CAR | Malpvtalllplalllhaarppgwfldspdrpwnpptfspallvvtegdnatftcsfsntsesfvlnw |
| | (aa) with | yrmspsnqtdklaafpedrsqpgqdcrfrvtqlpngrdfhmsvvrarrndsgtylcgaislapka |
| | signal | qikeslraelrvterraevptahpspsprpagqfqtlvtttpaprpptpaptiasqplslrpeacrpaag |
| | | gavhtrgldfacdiyiwaplagtcgvlllslvitlyckrgrkkllyifkqpfmrpvqttqeedgcscrf |
| | | peeeeggcelrvkfsrsadapaykqgqnqlynelnlgrreeydvldkrrgrdpemggkprrknp |
| | | geglynelqkdkmaeayseigmkgerrrgkghdglyqglstatkdtydalhmqalppr |
| 27 | PD-1 CAR | Atggccctccctgtcactgccctgcttctccccctegcactcctgctccacgccgctagaccacccg |
| | (na) | gatggtttctggactctccggatcgcccgtggaatcccccaaccttctcaccggcactcttggttgtga |
| | | ctgagggcgataatgcgaccttcacgtgctcgttctccaacacctccgaatcattcgtgctgaactggt |
| | | accgcatgagcccgtcaaaccagaccgacaagctcgccgcgtttccggaagatcggtcgcaaccg |
| | | ggacaggattgtcggttccgcgtgactcaactgccgaatggcagagacttccacatgagcgtggtcc |
| | | gogctaggcgaaacgactccgggacctacctgtgcggagccatctcgctggcgcctaaggcccaa |
| | | atcaaagagagcttgagggccgaactgagagtgaccgagcgcagagctgaggtgccaactgcac |
| | | atccatccccatcgcctcggcctgcggggcagtttcagaccctggtcacgaccactccggcgccgc |
| | | gcccaccgactccggccccaactatcgcgagccagcccctgtcgctgaggccggaagcatgccgc |
| | | cctgccgccggaggtgctgtgcatacccggggattggacttcgcatgcgacatctacatttgggctcc |
| | | tctcgccggaacttgtggcgtgctccttctgtccctggtcatcaccctgtactgcaagcggggtcgga |
| | | aaaagcttctgtacattttcaagcagcccttcatgaggcccgtgcaaaccacccaggaggaggacgg |
| | | ttgctcctgccggttccccgaagaggaagaaggaggttgcgagctgcgcgtgaagttctcccggag |
| | | cgccgacgcccccgcctataagcagggccagaaccagctgtacaacgaactgaacctgggacgg |
| | | cgggaagagtacgatgtgctggacaagcggcgcggccgggaccccgaaatgggcgggaagcct |
| | | agaagaaagaaccctcaggaaggcctgtataacgagctgcagaaggacaagatggccgaggcct |
| | | actccgaaattgggatgaagggagagcggcggaggggaaaggggcacgacggcctgtaccaag |
| | | gactgtccaccgccaccaaggacacatacgatgccctgcacatgcaggcccttccccctcgc |
| 28 | linker | (Gly-Gly-Gly-Ser)n, where n = 1-10 |
| 29 | linker | (Gly4 Ser)4 |
| 30 | linker | (Gly4 Ser)3 |
| 31 | linker | (Gly3Ser) |
| 39 | PD1 CAR | Pgwfldspdrpwnpptfspallvvtegdnatftcsfsntsesfvlnwyrmspsnqtdklaafpedr |
| | (aa) | sqpgqdcrfrvtqlpngrdfhmsvvrarrndsgtylcgaislapkaqikeslraelrvterraevpta |
| | | hpspsprpagqfqtlvtttpaprpptpaptiasqplslrpeacrpaaggavhtrgldfacdiyiwapl |
| | | agtcgvlllslvitlyckrgrkkllyifkqpfmrpvqttqeedgcscrfpeeeeggcelrvkfsrsada |
| | | paykqgqnqlynelnlgrreeydvldkrrgrdpemggkprrknpqeglynelqkdkmaeays |
| | | eigmkgerrrgkghdglyqglstatkdtydalhmqalppr |

[0465] In Vitro CAR-T Manufacture

[0466] While methods contemplated herein relate to in vivo transduction of cells, the challenges of in vitro manufacture are also appreciated.

[0467] In some embodiments, cells transduced the viral vector as described herein, are expanded, e.g., by a method described herein. In some embodiments, the cells are expanded in culture for a period of several hours (e.g., about 2, 3, 4, 5, 6, 7, 8, 9, 10, 15, 18, 21 hours) to about 14 days (e.g., 1, 2, 3, 4, 5, 6, 7, 8, 9, 10, 11, 12, 13 or 14 days). In some embodiments, the cells are expanded for a period of 4 to 9 days. In some embodiments, the cells are expanded for a period of 8 days or less, e.g., 7, 6 or 5 days. In some embodiments, the cells are expanded in culture for 5 days, and the resulting cells are more potent than the same cells expanded in culture for 9 days under the same culture conditions. Potency can be defined, e.g., by various T cell functions, e.g. proliferation, target cell killing, cytokine production, activation, migration, or combinations thereof. In some embodiments, the cells are expanded for 5 days show at least a one, two, three, or four-fold increase in cells doublings upon antigen stimulation as compared to the same cells expanded in culture for 9 days under the same culture conditions. In some embodiments, the cells are expanded in culture for 5 days, and the resulting cells exhibit higher proinflammatory cytokine production, e.g., IFN-7 and/or GM-CSF levels, as compared to the same cells expanded in culture for 9 days under the same culture conditions. In some embodiments, the cells expanded for 5 days show at least a one, two, three, four, five, ten-fold or more increase in μg/ml of proinflammatory cytokine production, e.g., IFN-7 and/or GM-CSF levels, as compared to the same cells expanded in culture for 9 days under the same culture conditions.

[0468] Initial activation steps in the absence of calcium can lead to magnified activation. As those of ordinary skill in the art would readily appreciate a washing step may be accomplished by methods known to those in the art, such as by using a semi-automated “flow-through” centrifuge (for example, the Cobe 2991 cell processor, the Baxter CytoMate, or the Haemonetics Cell Saver 5) according to the manufacturer's instructions. After washing, the cells may be resuspended in a variety of biocompatible buffers, such as, for example, Ca-free, Mg-free PBS, PlasmaLyte A, or other saline solution with or without buffer. Alternatively, the undesirable components of the apheresis sample may be removed, and the cells directly resuspended in culture media.

[0469] It is recognized that the in vitro methods of the application can utilize culture media conditions comprising 5% or less, for example 2%, human AB serum, and employ known culture media conditions and compositions, for example those described in Smith et al., “Ex vivo expansion of human T cells for adoptive immunotherapy using the novel Xeno-free CTS Immune Cell Serum Replacement” Clinical & Translational Immunology (2015) 4, e31; doi:10.1038/cti.2014.31.

[0470] In some aspects, T cells are isolated from peripheral blood lymphocytes by lysing the red blood cells and depleting the monocytes, for example, by centrifugation through a PERCOLL™ gradient or by counterflow centrifugal elutriation. The isolated T cells may be further used in the methods described herein.

[0471] The methods described herein can include, e.g., selection of a specific subpopulation of immune effector cells, e.g., T cells, that are a T regulatory cell-depleted population, CD25+ depleted cells, using, e.g., a negative selection technique, e.g., described herein. Preferably, the population of T regulatory depleted cells contains less than 30%, 25%, 20%, 15%, 10%, 5%, 4%, 3%, 2%, 1% of CD25+ cells.

[0472] In some embodiments, T regulatory cells, e.g., CD25+ T cells, are removed from the population using an anti-CD25 antibody, or fragment thereof, or a CD25-binding ligand, IL-2. In some embodiments, the anti-CD25 antibody, or fragment thereof, or CD25-binding ligand is conjugated to a substrate, e.g., a bead, or is otherwise coated on a substrate, e.g., a bead. In some embodiments, the anti-CD25 antibody, or fragment thereof, is conjugated to a substrate as described herein.

[0473] In some embodiments, the T regulatory cells, e.g., CD25+ T cells, are removed from the population using CD25 depletion reagent from Miltenyi™. In some embodiments, the ratio of cells to CD25 depletion reagent is 1×10⁷ cells to 20 μL, or 1×10⁷ cells to 15 μL, or 1×10⁷ cells to 10 μL, or 1×10⁷ cells to 5 μL, or 1×10⁷ cells to 2.5 μL, or 1×10⁷ cells to 1.25 μL. In some embodiments, e.g., for T regulatory cells, e.g., CD25+ depletion, greater than 500 million cells/ml is used. In a further aspect, a concentration of cells of 600, 700, 800, or 900 million cells/ml is used.

[0474] In some embodiments, the population of immune effector cells to be depleted includes about 6×10⁹ CD25+ T cells. In other aspects, the population of immune effector cells to be depleted include about 1×10⁹ to 1×10¹⁰ CD25+ T cell, and any integer value in between. In some embodiments, the resulting population T regulatory depleted cells has 2×10⁹ T regulatory cells, e.g., CD25+ cells, or less (e.g., 1×10⁹, 5×10⁸, 1×10⁸, 5×10⁷, 1×10⁷, or less CD25+ cells).

[0475] In some embodiments, the T regulatory cells, e.g., CD25+ cells, are removed from the population using the CliniMAC system with a depletion tubing set, such as, e.g., tubing 162-01. In some embodiments, the CliniMAC system is run on a depletion setting such as, e.g., DEPLETION2.1.

[0476] Without wishing to be bound by a particular theory, decreasing the level of negative regulators of immune cells (e.g., decreasing the number of unwanted immune cells, e.g., T_{REG}cells), in a subject prior to apheresis or during manufacturing of a CAR-expressing cell product can reduce the risk of subject relapse. For example, methods of depleting T_{REG} cells are known in the art. Methods of decreasing T_{REG} cells include, but are not limited to, cyclophosphamide, anti-GITR antibody (an anti-GITR antibody described herein), CD25-depletion, and combinations thereof.

[0477] In some embodiments, the manufacturing methods comprise reducing the number of (e.g., depleting) TREG cells prior to manufacturing of the CAR-expressing cell. For example, manufacturing methods comprise contacting the sample, e.g., the apheresis sample, with an anti-GITR antibody and/or an anti-CD25 antibody (or fragment thereof, or a CD25-binding ligand), e.g., to deplete T_{REG} cells prior to manufacturing of the CAR-expressing cell (e.g., T cell, NK cell) product.

[0478] In some embodiments, a subject is pre-treated with one or more therapies that reduce T_{REG} cells prior to collection of cells for CAR-expressing cell product manufacturing, thereby reducing the risk of subject relapse to CAR-expressing cell treatment. In some embodiments, methods of decreasing T_{REG} cells include, but are not limited to, administration to the subject of one or more of cyclophosphamide, anti-GITR antibody, CD25-depletion, or a combination thereof Administration of one or more of cyclophosphamide, anti-GITR antibody, CD25-depletion, or a combination thereof, can occur before, during or after an infusion of the CAR-expressing cell product.

[0479] In some embodiments, a subject is pre-treated with cyclophosphamide prior to collection of cells for CAR-expressing cell product manufacturing, thereby reducing the risk of subject relapse to CAR-expressing cell treatment. In some embodiments, a subject is pre-treated with an anti-GITR antibody prior to collection of cells for CAR-expressing cell product manufacturing, thereby reducing the risk of subject relapse to CAR-expressing cell treatment.

[0480] In some embodiments, the population of cells to be removed are neither the regulatory T cells or tumor cells, but cells that otherwise negatively affect the expansion and/or function of CART cells, e.g. cells expressing CD14, CD11b, CD33, CD15, or other markers expressed by potentially immune suppressive cells. In some embodiments, such cells are envisioned to be removed concurrently with regulatory T cells and/or tumor cells, or following said depletion, or in another order.

[0481] The methods described herein can include more than one selection step, e.g., more than one depletion step. Enrichment of a T cell population by negative selection can be accomplished, e.g., with a combination of antibodies directed to surface markers unique to the negatively selected cells. One method is cell sorting and/or selection via negative magnetic immunoadherence or flow cytometry that uses a cocktail of monoclonal antibodies directed to cell surface markers present on the cells negatively selected. For example, to enrich for CD4+ cells by negative selection, a monoclonal antibody cocktail can include antibodies to CD14, CD20, CD11b, CD16, HLA-DR, and CD8.

[0482] The methods described herein can further include removing cells from the population which express a tumor antigen, e.g., a tumor antigen that does not comprise CD25, e.g., CD19, CD30, CD38, CD123, CD20, CD14 or CD11b, to thereby provide a population of T regulatory depleted, e.g., CD25+ depleted, and tumor antigen depleted cells that are suitable for expression of a CAR, e.g., a CAR described herein. In some embodiments, tumor antigen expressing cells are removed simultaneously with the T regulatory, e.g., CD25+ cells. For example, an anti-CD25 antibody, or fragment thereof, and an anti-tumor antigen antibody, or fragment thereof, can be attached to the same substrate, e.g., bead, which can be used to remove the cells or an anti-CD25 antibody, or fragment thereof, or the anti-tumor antigen antibody, or fragment thereof, can be attached to separate beads, a mixture of which can be used to remove the cells. In other embodiments, the removal of T regulatory cells, e.g., CD25+ cells, and the removal of the tumor antigen expressing cells is sequential, and can occur, e.g., in either order.

[0483] Also provided are methods that include removing cells from the population which express a check point inhibitor, e.g., a check point inhibitor described herein, e.g., one or more of PD1+ cells, LAG3+ cells, and TIM3+ cells, to thereby provide a population of T regulatory depleted, e.g., CD25+ depleted cells, and check point inhibitor depleted cells, e.g., PD1+, LAG3+ and/or TIM3+ depleted cells. Exemplary check point inhibitors include B7-H1, B7-1, CD160, P1H, 2B4, PD1, TIM3, CEACAM (e.g., CEACAM-1, CEACAM-3 and/or CEACAM-5), LAG3, TIGIT, CTLA-4, BTLA, and LAIR1. In some embodiments, check point inhibitor expressing cells are removed simultaneously with the T regulatory, e.g., CD25+ cells. For example, an anti-CD25 antibody, or fragment thereof, and an anti-check point inhibitor antibody, or fragment thereof, can be attached to the same bead which can be used to remove the cells, or an anti-CD25 antibody, or fragment thereof, and the anti-check point inhibitor antibody, or fragment there, can be attached to separate beads, a mixture of which can be used to remove the cells. In other embodiments, the removal of T regulatory cells, e.g., CD25+ cells, and the removal of the check point inhibitor expressing cells is sequential, and can occur, e.g., in either order.

[0484] Methods described herein can include a positive selection step. For example, T cells can isolated by incubation with anti-CD3/anti-CD28 (e.g., 3×28)-conjugated beads, such as DYNABEADS® M-450 CD3/CD28 T, for a time period sufficient for positive selection of the desired T cells. In some embodiments, the time period is about 30 minutes. In a further embodiment, the time period ranges from 30 minutes to 36 hours or longer and all integer values there between. In a further embodiment, the time period is at least 1, 2, 3, 4, 5, or 6 hours. In yet another embodiment, the time period is 10 to 24 hours, e.g., 24 hours. Longer incubation times may be used to isolate T cells in any situation where there are few T cells as compared to other cell types, such in isolating tumor infiltrating lymphocytes (TIL) from tumor tissue or from immunocompromised individuals. Further, use of longer incubation times can increase the efficiency of capture of CD8+ T cells. Thus, by simply shortening or lengthening the time T cells are allowed to bind to the CD3/CD28 beads and/or by increasing or decreasing the ratio of beads to T cells (as described further herein), subpopulations of T cells can be preferentially selected for or against at culture initiation or at other time points during the process. Additionally, by increasing or decreasing the ratio of anti-CD3 and/or anti-CD28 antibodies on the beads or other surface, subpopulations of T cells can be preferentially selected for or against at culture initiation or at other desired time points. In some embodiments, a T cell population can be selected that expresses one or more of IFN-γ, TNFα, IL-17A, IL-2, IL-3, IL-4, GM-CSF, IL-10, IL-13, granzyme B, and perforin, or other appropriate molecules, e.g., other cytokines. Methods for screening for cell expression can be determined, e.g., by the methods described in PCT Publication No.: WO 2013/126712.

[0485] For isolation of a desired population of cells by positive or negative selection, the concentration of cells and surface (e.g., particles such as beads) can be varied. In some aspects, it may be desirable to significantly decrease the volume in which beads and cells are mixed together (e.g., increase the concentration of cells), to ensure maximum contact of cells and beads. For example, in some aspects, a concentration of 10 billion cells/ml, 9 billion/ml, 8 billion/ml, 7 billion/ml, 6 billion/ml, or 5 billion/ml is used. In some aspects, a concentration of 1 billion cells/ml is used. In yet some aspects, a concentration of cells from 75, 80, 85, 90, 95, or 100 million cells/ml is used. In further aspects, concentrations of 125 or 150 million cells/ml can be used.

[0486] Using high concentrations can result in increased cell yield, cell activation, and cell expansion. Further, use of high cell concentrations allows more efficient capture of cells that may weakly express target antigens of interest, such as CD28-negative T cells, or from samples where there are many tumor cells present (e.g., leukemic blood, tumor tissue, etc.). Such populations of cells may have therapeutic value and would be desirable to obtain. For example, using high concentration of cells allows more efficient selection of CD8+ T cells that normally have weaker CD28 expression.

[0487] In some embodiments, it may be desirable to use lower concentrations of cells. By significantly diluting the mixture of T cells and surface (e.g., particles such as beads), interactions between the particles and cells are minimized. This selects for cells that express high amounts of desired antigens to be bound to the particles. For example, CD4+ T cells express higher levels of CD28 and are more efficiently captured than CD8+ T cells in dilute concentrations. In some aspects, the concentration of cells used is 5×10⁶/ml. In other aspects, the concentration used can be from about 1×10⁵/ml to 1×10⁶/ml, and any integer value in between.

[0488] In other aspects, the cells may be incubated on a rotator for varying lengths of time at varying speeds at either 2-10° C. or at room temperature.

[0489] T cells for stimulation can also be frozen after a washing step. Wishing not to be bound by theory, the freeze and subsequent thaw step provide a more uniform product by removing granulocytes and to some extent monocytes in the cell population. After the washing step that removes plasma and platelets, the cells may be suspended in a freezing solution. While many freezing solutions and parameters are known in the art and will be useful in this context, one method involves using PBS containing 20% DMSO and 8% human serum albumin, or culture media containing 10% Dextran 40 and 5% Dextrose, 20% Human Serum Albumin and 7.5% DMSO, or 31.25% Plasmalyte-A, 31.25% Dextrose 5%, 0.45% NaCl, 10% Dextran 40 and 5% Dextrose, 20% Human Serum Albumin, and 7.5% DMSO or other suitable cell freezing media containing for example, Hespan and PlasmaLyte A, the cells then are frozen to −80° C. at a rate of 1° per minute and stored in the vapor phase of a liquid nitrogen storage tank. Other methods of controlled freezing may be used as well as uncontrolled freezing immediately at −20° C. or in liquid nitrogen.

[0490] In some aspects, cryopreserved cells are thawed and washed as described herein and allowed to rest for one hour at room temperature prior to activation using the methods of the present invention.

[0491] Also contemplated in the context of the invention is the collection of blood samples or apheresis product from a subject at a time period prior to when the expanded cells as described herein might be needed. As such, the source of the cells to be expanded can be collected at any time point necessary, and desired cells, such as T cells, can be isolated and frozen for later use in immune effector cell therapy for any number of diseases or conditions that would benefit from immune effector cell therapy, such as those described herein. In some aspects a blood sample or an apheresis is taken from a generally healthy subject. In some aspects, a blood sample or an apheresis is taken from a generally healthy subject who is at risk of developing a disease, but who has not yet developed a disease, and the cells of interest are isolated and frozen for later use. In some aspects, the T cells may be expanded, frozen, and used at a later time. In some aspects, samples are collected from a patient shortly after diagnosis of a particular disease as described herein but prior to any treatments. In a further aspect, the cells are isolated from a blood sample or an apheresis from a subject prior to any number of relevant treatment modalities, including but not limited to treatment with agents such as natalizumab, efalizumab, antiviral agents, chemotherapy, radiation, immunosuppressive agents, such as cyclosporin, azathioprine, methotrexate, mycophenolate, and FK506, antibodies, or other immunoablative agents such as CAMPATH, anti-CD3 antibodies, cytoxan, fludarabine, cyclosporin, FK506, rapamycin, mycophenolic acid, steroids, FR901228, and irradiation.

[0492] In a further aspect of the present invention, T cells are obtained from a patient directly following treatment that leaves the subject with functional T cells. In this regard, it has been observed that following certain cancer treatments, in particular treatments with drugs that damage the immune system, shortly after treatment during the period when patients would normally be recovering from the treatment, the quality of T cells obtained may be optimal or improved for their ability to expand ex vivo. Likewise, following ex vivo manipulation using the methods described herein, these cells may be in a preferred state for enhanced engraftment and in vivo expansion. Thus, it is contemplated within the context of the present invention to collect blood cells, including T cells, dendritic cells, or other cells of the hematopoietic lineage, during this recovery phase. Further, in some aspects, mobilization (for example, mobilization with GM-CSF) and conditioning regimens can be used to create a condition in a subject wherein repopulation, recirculation, regeneration, and/or expansion of particular cell types is favored, especially during a defined window of time following therapy. Illustrative cell types include T cells, B cells, dendritic cells, and other cells of the immune system.

[0493] In some embodiments, a T cell population is diaglycerol kinase (DGK)-deficient. DGK-deficient cells include cells that do not express DGK RNA or protein or have reduced or inhibited DGK activity. DGK-deficient cells can be generated by genetic approaches, e.g., administering RNA-interfering agents, e.g., siRNA, shRNA, miRNA, to reduce or prevent DGK expression. Alternatively, DGK-deficient cells can be generated by treatment with DGK inhibitors described herein.

[0494] In some embodiments, a T cell population is Ikaros-deficient. Ikaros-deficient cells include cells that do not express Ikaros RNA or protein, or have reduced or inhibited Ikaros activity, Ikaros-deficient cells can be generated by genetic approaches, e.g., administering RNA-interfering agents, e.g., siRNA, shRNA, miRNA, to reduce or prevent Ikaros expression. Alternatively, Ikaros-deficient cells can be generated by treatment with Ikaros inhibitors, e.g., lenalidomide.

[0495] In embodiments, a T cell population is DGK-deficient and Ikaros-deficient, e.g., does not express DGK and Ikaros, or has reduced or inhibited DGK and Ikaros activity. Such DGK and Ikaros-deficient cells can be generated by any of the methods described herein.

In some embodiments, the NK cells are obtained from the subject. In another embodiment, the NK cells are an NK cell line, e.g., NK-92 cell line (Conkwest).

[0496] In a particular exemplary aspect, subjects may undergo leukapheresis, wherein leukocytes are collected, enriched, or depleted ex vivo to select and/or isolate the cells of interest, e.g., T cells. These T cell isolates may be expanded by methods described herein. Subjects in need thereof may subsequently undergo standard treatment with high dose chemotherapy followed by peripheral blood stem cell transplantation. In some aspects, following or concurrent with the transplant, subjects receive an infusion of the expanded CAR T cells as prepared by the methods of the present invention. In an additional aspect, expanded cells are administered before or following surgery.

[0497] Additional Expressed Agents

[0498] Co-Expression of an Agent that Enhances CAR Activity

[0499] In the embodiments contemplated herein, it is appreciated that additional agents may be encoded in the vectors described herein above. Accordingly, these agents are described below in relation to the CAR-expressing cell.

[0500] In another embodiment, a CAR-expressing immune effector cell described herein can further express another agent, e.g., an agent which enhances the activity of a CAR-expressing cell. For example, in some embodiments, the agent can be an agent which inhibits an inhibitory molecule. Examples of inhibitory molecules include PD-1, PD-L1, CTLA-4, TIM-3, CEACAM (e.g., CEACAM-1, CEACAM-3 and/or CEACAM-5), LAG-3, VISTA, BTLA, TIGIT, LAIR1, CD160, 2B4 and TGFR beta, e.g., as described herein. In some embodiments, the agent that inhibits an inhibitory molecule comprises a first polypeptide, e.g., an inhibitory molecule, associated with a second polypeptide that provides a positive signal to the cell, e.g., an intracellular signaling domain described herein. In some embodiments, the agent comprises a first polypeptide, e.g., of an inhibitory molecule such as PD-1, PD-L1, CTLA-4, TIM-3, CEACAM (e.g., CEACAM-1, CEACAM-3 and/or CEACAM-5), LAG-3, VISTA, BTLA, TIGIT, LAIR1, CD160, 2B4, or TGFR beta, or a fragment of any of these, and a second polypeptide which is an intracellular signaling domain described herein (e.g., comprising a costimulatory domain (e.g., 41BB, CD27 or CD28, e.g., as described herein) and/or a primary signaling domain (e.g., a CD3 zeta signaling domain described herein). In some embodiments, the agent comprises a first polypeptide of PD-1 or a fragment thereof, and a second polypeptide of an intracellular signaling domain described herein (e.g., a CD28, CD27, OX40 or 4-IBB signaling domain described herein and/or a CD3 zeta signaling domain described herein).

[0501] Co-Expression of a Second CAR

[0502] In some embodiments, the CAR-expressing cell described herein can further comprise a second CAR, for example, a second CAR that includes a different antigen binding domain, for example, to the same target (for example, CD19) or a different target (for example, a target other than CD19, for example, a target described herein).

[0503] In some embodiments, the CAR-expressing cell described herein, e.g., the CAR-expressing cell manufactured using a method described herein, comprises (i) a first nucleic acid molecule encoding a first CAR that binds to BCMA and (ii) a second nucleic acid molecule encoding a second CAR that binds to CD19. In some embodiments, the first CAR comprises an anti-BCMA binding domain, a first transmembrane domain, and a first intracellular signaling domain, wherein the anti-BCMA binding domain comprises a heavy chain variable region (VH) comprising a heavy chain complementary determining region 1 (HC CDR1), a heavy chain complementary determining region 2 (HC CDR2), and a heavy chain complementary determining region 3 (HC CDR3), and a light chain variable region (VL) comprising a light chain complementary determining region 1 (LC CDR1), a light chain complementary determining region 2 (LC CDR2), and a light chain complementary determining region 3 (LC CDR3), wherein the HC CDR1, HC CDR2, HC CDR3, LC CDR1, LC CDR2, and LC CDR3 comprise the amino acid sequences of SEQ ID NOs: 86, 87, 88, 95, 96, and 97, respectively. In some embodiments, the second CAR comprises an anti-CD19 binding domain, a second transmembrane domain, and a second intracellular signaling domain, wherein the anti-CD19 binding domain comprises a VH comprising a HC CDR1, a HC CDR2, and a HC CDR3, and a VL comprising a LC CDR1, a LC CDR2, and a LC CDR3, wherein the HC CDR1, HC CDR2, HC CDR3, LC CDR1, LC CDR2, and LC CDR3 comprise the amino acid sequences of SEQ ID NOs: 760, 687, 762, 763, 764, and 765, respectively. In some embodiments, (i) the VH and VL of the anti-BCMA binding domain comprise the amino acid sequences of SEQ ID NOs: 93 and 102, respectively. In some embodiments, the VH and VL of the anti-CD19 binding domain comprise the amino acid sequences of SEQ ID NOs: 250A and 251A, respectively. In some embodiments, the anti-BCMA binding domain comprises the amino acid sequence of SEQ ID NO: 105. In some embodiments, the anti-CD19 binding domain comprises the amino acid sequence of SEQ ID NO: 758. In some embodiments, the first CAR comprises the amino acid sequence of SEQ ID NO: 107. In some embodiments, the second CAR comprise the amino acid sequence of SEQ ID NO: 225.

[0504] In some embodiments, the CAR-expressing cell described herein, e.g., the CAR-expressing cell manufactured using a method described herein, comprises (i) a first nucleic acid molecule encoding a first CAR that binds to CD22 and (ii) a second nucleic acid molecule encoding a second CAR that binds to CD19. In some embodiments, the CD22 CAR comprises a CD22 antigen binding domain, and a first transmembrane domain; a first co-stimulatory signaling domain; and/or a first primary signaling domain. In some embodiments, the CD19 CAR comprises a CD19 antigen binding domain, and a second transmembrane domain; a second co-stimulatory signaling domain; and/or a second primary signaling domain.

[0505] In some embodiments, the CD22 antigen binding domain comprises one or more (e.g., all three) light chain complementarity determining region 1 (LC CDR1), light chain complementarity determining region 2 (LC CDR2), and light chain complementarity determining region 3 (LC CDR3) of a CD22 binding domain described herein, e.g., in Tables 15, 16, 30, 31, or 32; and/or one or more (e.g., all three) heavy chain complementarity determining region 1 (HC CDR1), heavy chain complementarity determining region 2 (HC CDR2), and heavy chain complementarity determining region 3 (HC CDR3) of a CD22 binding domain described herein, e.g., in Tables 15, 16, 30, 31 or 32. In an embodiment, the CD22 antigen binding domain comprises a LC CDR1, LC CDR2 and LC CDR3 of a CD22 binding domain described herein, e.g., in Table 15, 16, 30, 31 or 32; and/or a HC CDR1, HC CDR2 and HC CDR3 of a CD22 binding domain described herein, e.g., in Tables 15, 16, 30, 31 or 32. In some embodiments, the CD19 antigen binding domain comprises: one or more (e.g., all three) LC CDR1, LC CDR2, and LC CDR3 of a CD19 binding domain described herein, e.g., in Tables 1, 30, 31, or 32; and/or one or more (e.g., all three) HC CDR1, HC CDR2, and HC CDR3 of a CD19 binding domain described herein, e.g., in Tables 1, 30, 31, and 32. In some embodiments, the CD19 antigen binding domain comprises a LC CDR1, LC CDR2 and LC CDR3 of a CD19 binding domain described herein, e.g., in Tables 1, 30, 31, and 32; and/or a HC CDR1, HC CDR2 and HC CDR3 of a CD19 binding domain described herein, e.g., in Tables 1, 30, 31, and 32.

[0506] In some embodiment, the CD22 antigen binding domain (e.g., an scFv) comprises a light chain variable (VL) region of a CD22 binding domain described herein, e.g., in Tables 30 or 32; and/or a heavy chain variable (VH) region of a CD22 binding domain described herein, e.g., in Tables 30 or 32. In some embodiments, the CD22 antigen binding domain comprises a VL region comprising an amino acid sequence having at least one, two or three modifications (e.g., substitutions) but not more than 30, 20 or 10 modifications (e.g., substitutions) of a CD22 VL region sequence provided in Table 30 or 32. In some embodiments, the CD22 antigen binding domain comprises a VL region comprising an amino acid sequence provided in Table 30 or 32, or a sequence having at least about 80%, 85%, 90%, 92%, 95%, 97%, 98%, or 99% sequence identity to any of the aforesaid sequences. In some embodiments, the CD22 antigen binding domain comprises a VH region comprising an amino acid sequence having at least one, two or three modifications (e.g., substitutions) but not more than 30, 20 or 10 modifications (e.g., substitutions) of a CD22 VH region sequence provided in Table 30 or 32. In some embodiments, the CD22 antigen binding domain comprises a VH region comprising the amino acid sequence of a CD22 VH region sequence provided in Table 30 or 32, or a sequence having at least about 80%, 85%, 90%, 92%, 95%, 97%, 98%, or 99% sequence identity to any of the aforesaid sequences. In some embodiments, the CD19 antigen binding domain (e.g., an scFv) comprises a VL region of a CD19 binding domain described herein, e.g., in Tables 1, 30, or 32; and/or a VH region of a CD19 binding domain described herein, e.g., in Tables 1, 30, or 32. In some embodiments, the CD19 antigen binding domain comprises a VL region comprising an amino acid sequence having at least one, two or three modifications (e.g., substitutions) but not more than 30, 20 or 10 modifications (e.g., substitutions) of a CD19 VL region sequence provided in Tables 1, 30, or 32. In some embodiments, the CD19 antigen binding domain comprises a VL region comprising the amino acid sequence of a CD19 VL region sequence provided in Tables 1, 30, or 32, or a sequence having at least about 80%, 85%, 90%, 92%, 95%, 97%, 98%, or 99% sequence identity to any of the aforesaid sequences. In some embodiments, the CD19 antigen binding domain comprises a VH region comprising an amino acid sequence having at least one, two or three modifications (e.g., substitutions) but not more than 30, 20 or 10 modifications (e.g., substitutions) of a CD19 VH region sequence provided in Tables 1, 30, or 32. In some embodiments, the CD19 antigen binding domain comprises a VH region comprising the amino acid sequence of a CD19 VH region sequence provided in Tables 1, 30, or 32, or a sequence having at least about 80%, 85%, 90%, 92%, 95%, 97%, 98%, or 99% sequence identity to any of the aforesaid sequences.

[0507] In some embodiments, the CD22 antigen binding comprises an scFv comprising an amino acid sequence having at least one, two or three modifications (e.g., substitutions) but not more than 30, 20 or 10 modifications (e.g., substitutions) of a CD22 scFv sequence provided in Table 30 or 32. In some embodiments, the CD22 antigen binding comprises an scFv comprising an amino acid sequence of a CD22 scFv sequence provided in Table 30 or 32, or a sequence having at least about 80%, 85%, 90%, 92%, 95%, 97%, 98%, or 99% sequence identity to any of the aforesaid sequences. In some embodiments, the CD19 antigen binding domain comprises an scFv comprising an amino acid sequence having at least one, two or three modifications (e.g., substitutions) but not more than 30, 20 or 10 modifications (e.g., substitutions) of a CD19 scFv sequence provided in Tables 1, 30, or 32. In some embodiments, the CD19 antigen binding domain comprises an scFv comprising the amino acid sequence of a CD19 scFv sequence provided in Tables 1, 30, or 32, or a sequence having at least about 80%, 85%, 90%, 92%, 95%, 97%, 98%, or 99% sequence identity to any of the aforesaid sequences.

[0508] In some embodiments, the CD22 CAR molecule and/or the CD19 CAR molecule comprises an additional component, e.g., a signal peptide, a hinge, a transmembrane domain, a co-stimulatory signaling domain and/or a first primary signaling domain, a P2A site, and/or a linker, comprising an amino acid sequence provided in Table 33, or a sequence having at least about 70%, 75%, 80%, 85%, 90%, 92%, 95%, 97%, 98%, or 99% sequence identity to any of the aforesaid sequences; or is encoded by a nucleotide sequence provided in Table 33, or a sequence having at least about 70%, 75%, 80%, 85%, 90%, 92%, 95%, 97%, 98%, or 99% sequence identity to any of the aforesaid sequences.

[0509] Exemplary nucleotide and amino acid sequences of a CAR molecule, e.g., a dual CAR molecule comprising (i) a first CAR that binds to CD22 and (ii) a second CAR that binds to CD19 disclosed herein, is provided in Table 30.

TABLE 30
Dual and tandem CD19-CD22 CAR sequences

| | | |
|---|---|---|
| | SEQ ID | |
| Identifier | NO | Sequence |

Tandem CD19-CD22 CARS

| | | |
|---|---|---|
| CG#c171 | 813 | atggccctccctgtcaccgccctgctgcttccgctggctcttctgctccacgccgctcggcccg |
| | | aaattgtgatgacccagtcacccgccactcttagcctttcacccggtgagcgcgcaaccctgtc |
| | | ttgcagagcctcccaagacatctcaaaataccttaattggtatcaacagaagcccggacaggc |
| | | tcctcgccttctgatctaccacaccagccggctccattctggaatccctgccaggttcagcggt |
| | | agcggatctgggaccgactacaccctcactatcagctcactgcagccagaggacttcgctgtc |
| | | tatttctgtcagcaagggaacaccctgccctacacctttggacagggcaccaagctcgagatt |
| | | aaaggtggaggtggcagcggaggaggtgggtccggcggtggaggaagccaggtccaact |
| | | ccaagaaagcggaccgggtcttgtgaagccatcagaaactctttcactgacttgtactgtgagc |
| | | ggagtgtctctccccgattacggggtgtcttggatcagacagccaccggggaagggtctgga |
| | | atggattggagtgatttggggctctgagactacttactaccaatcatccctcaagtcacgcgtca |
| | | ccatctcaaaggacaactctaagaatcaggtgtcactgaaactgtcatctgtgaccgcagccg |
| | | acaccgccgtgtactattgcgctaagcattactattatggcgggagctacgcaatggattactg |
| | | gggacagggtactctggtcaccgtgtccagcttggcagaagccgccgcgaaagaagtgcag |
| | | cttcaacaatcaggaccaggactcgtcaaaccatcacagaccctctccctcacatgtgccatct |
| | | ccggggactccatgttgagcaattccgacacttggaattggattagacaaagcccgtcccggg |
| | | gtctggaatggttgggacgcacctaccaccggtctacttggtacgacgactacgcgtcatccg |
| | | tgcggggaagagtgtccatcaacgtggacacctccaagaaccagtacagcctgcagcttaat |
| | | gccgtgactcctgaggatacgggcgtctactactgcgcccgcgtccgcctgcaagacggga |
| | | acagctggagcgatgcattcgatgtctggggccagggaactatggtcaccgtgtcgtctggg |
| | | ggcggtggatcgggtggcgggggttcggggggggcggctctcagtccgctcttacccaac |
| | | cggcctcagcctcggggagccccggccagagcgtgaccatttcctgcaccggcacttcatcc |
| | | gacgtgggcggctacaactacgtgtcctggtaccaacagcacccgggaaaggcccccaag |
| | | ctcatgatctacgacgtgtccaacaggccctcgggagtgtccaaccggttctcgggttcgaaa |
| | | tcgggaaacacagccagcctgaccatcagcggactgcaggctgaagatgaagccgactact |
| | | actgctcctcctacacctcgtcatccacgctctacgtgttcggcactggaactcagctgactgtg |
| | | ctgaccactaccccagcaccgaggccacccaccccggctcctaccatcgcctcccagcctct |
| | | gtccctgcgtccggaggcatgtagacccgcagctggtggggccgtgcatacccggggtctt |
| | | gacttcgcctgcgatatctacatttgggcccctctggctggtacttgcggggtcctgctgctttca |
| | | ctcgtgatcactctttactgtaagcgcggtcggaagaagctgctgtacatctttaagcaaccctt |
| | | catgaggcctgtgcagactactcaagaggaggacggctgttcatgccggttcccagaggag |
| | | gaggaaggcggctgcgaactgcgcgtgaaattcagccgcagcgcagatgctccagcctac |
| | | cagcaggggcagaaccagctctacaacgaactcaatcttggtcggagagaggagtacgacg |
| | | tgctggacaagcggagaggacgggacccagaaatgggcgggaagccgcgcagaaagaa |
| | | tccccaagagggcctgtacaacgagctccaaaaggataagatggcagaagcctatagcgag |
| | | attggtatgaaaggggaacgcagaagaggcaaaggccacgacggactgtaccagggactc |
| | | agcaccgccaccaaggacacctatgacgctcttcacatgcaggccctgccgcctcgg |
| | 814 | MALPVTALLLPLALLLHAARPEIVMTQSPATLSLSPGERAT |
| | | LSCRASQDISKYLNWYQQKPGQAPRLLIYHTSRLHSGIPAR |
| | | FSGSGSGTDYTLTISSLQPEDFAVYFCQQGNTLPYTFGQGT |
| | | KLEIKGGGGSGGGGSGGGGSQVQLQESGPGLVKPSETLSLT |
| | | CTVSGVSLPDYGVSWIRQPPGKGLEWIGVIWGSETTYYQSS |
| | | LKSRVTISKDNSKNQVSLKLSSVTAADTAVYYCAKHYYYG |
| | | GSYAMDYWGQGTLVTVSSLAEAAAKEVQLQQSGPGLVKP |
| | | SQTLSLTCAISGDSMLSNSDTWNWIRQSPSRGLEWLGRTY |
| | | HRSTWYDDYASSVRGRVSINVDTSKNQYSLQLNAVTPEDT |
| | | GVYYCARVRLQDGNSWSDAFDVWGQGTMVTVSSGGGGS |
| | | GGGGSGGGGSQSALTQPASASGSPGQSVTISCTGTSSDVGG |
| | | YNYVSWYQQHPGKAPKLMIYDVSNRPSGVSNRFSGSKSG |
| | | NTASLTISGLQAEDEADYYCSSYTSSSTLYVFGTGTQLTVL |
| | | TTTPAPRPPTPAPTIASQPLSLRPEACRPAAGGAVHTRGLDF |
| | | ACDIYIWAPLAGTCGVLLLSLVITLYCKRGRKKLLYIFKQPF |
| | | MRPVQTTQEEDGCSCRFPEEEEGGCELRVKFSRSADAPAY |
| | | QQGQNQLYNELNLGRREEYDVLDKRRGRDPEMGGKPRRK |
| | | NPQEGLYNELQKDKMAEAYSEIGMKGERRRGKGHDGLYQ |
| | | GLSTATKDTYDALHMQALPPR |
| CG#c182 | 815 | atggccctccctgtcaccgccctgctgcttccgctggctcttctgctccacgccgctcggcccg |
| | | aagtgcagcttcaacaatcaggaccaggactcgtcaaaccatcacagaccctctccctcacat |
| | | gtgccatctccggggactccatgttgagcaattccgacacttggaattggattagacaaagccc |
| | | gtcccggggtctggaatggttgggacgcacctaccaccggtctacttggtacgacgactacg |
| | | cgtcatccgtgcggggaagagtgtccatcaacgtggacacctccaagaaccagtacagcctg |
| | | cagcttaatgccgtgactcctgaggatacgggcgtctactactgcgcccgcgtccgcctgcaa |
| | | gacgggaacagctggagcgatgcattcgatgtctggggccagggaactatggtcaccgtgtc |
| | | gtctgggggcggtggatcgggtggcgggggttcggggggggcggctctcagtccgctctt |
| | | acccaaccggcctcagcctcggggagccccggccagagcgtgaccatttcctgcaccggc |
| | | acttcatccgacgtgggcggctacaactacgtgtcctggtaccaacagcacccgggaaaggc |
| | | ccccaagctcatgatctacgacgtgtccaacaggccctcgggagtgtccaaccggttctcgg |
| | | gttcgaaatcgggaaacacagccagcctgaccatcagcggactgcaggctgaagatgaagc |
| | | cgactactactgctcctcctacacctcgtcatccacgctctacgtgttcggcactggaactcagc |
| | | tgactgtgctgggagggggagggagtgaaattgtgatgacccagtcacccgccactcttagc |
| | | ctttcacccggtgagcgcgcaaccctgtcttgcagagcctcccaagacatctcaaaatacctta |
| | | attggtatcaacagaagcccggacaggctcctcgccttctgatctaccacaccagccggctcc |
| | | attctggaatccctgccaggttcagcggtagcggatctgggaccgactacaccctcactatca |
| | | gctcactgcagccagaggacttcgctgtctatttctgtcagcaagggaacaccctgccctaca |
| | | cctttggacagggcaccaagctcgagattaaaggtggaggtggcagcggaggaggtgggt |
| | | ccggcggtggaggaagccaggtccaactccaagaaagcggaccgggtcttgtgaagccat |
| | | cagaaactctttcactgacttgtactgtgagcggagtgtctctccccgattacggggtgtcttgg |
| | | atcagacagccaccggggaagggtctggaatggattggagtgatttggggctctgagactac |
| | | ttactaccaatcatccctcaagtcacgcgtcaccatctcaaaggacaactctaagaatcaggtg |
| | | tcactgaaactgtcatctgtgaccgcagccgacaccgccgtgtactattgcgctaagcattact |
| | | attatggcgggagctacgcaatggattactggggacagggtactctggtcaccgtgtccagca |
| | | ccactaccccagcaccgaggccacccaccccggctcctaccatcgcctcccagcctctgtcc |
| | | ctgcgtccggaggcatgtagacccgcagctggtggggccgtgcatacccggggtcttgactt |
| | | cgcctgcgatatctacatttgggcccctctggctggtacttgcggggtcctgctgctttcactcgt |
| | | gatcactctttactgtaagcgcggtcggaagaagctgctgtacatctttaagcaacccttcatga |
| | | ggcctgtgcagactactcaagaggaggacggctgttcatgccggttcccagaggaggagga |
| | | aggcggctgcgaactgcgcgtgaaattcagccgcagcgcagatgctccagcctaccagcag |
| | | gggcagaaccagctctacaacgaactcaatcttggtcggagagaggagtacgacgtgctgg |
| | | acaagcggagaggacgggacccagaaatgggcgggaagccgcgcagaaagaatcccca |
| | | agagggcctgtacaacgagctccaaaaggataagatggcagaagcctatagcgagattggt |
| | | atgaaaggggaacgcagaagaggcaaaggccacgacggactgtaccagggactcagcac |
| | | cgccaccaaggacacctatgacgctcttcacatgcaggccctgccgcctcgg |
| | 816 | MALPVTALLLPLALLLHAARPEVQLQQSGPGLVKPSQTLSL |
| | | TCAISGDSMLSNSDTWNWIRQSPSRGLEWLGRTYHRSTWY |
| | | DDYASSVRGRVSINVDTSKNQYSLQLNAVTPEDTGVYYCA |
| | | RVRLQDGNSWSDAFDVWGQGTMVTVSSGGGGSGGGGSG |
| | | GGGSQSALTQPASASGSPGQSVTISCTGTSSDVGGYNYVS |
| | | WYQQHPGKAPKLMIYDVSNRPSGVSNRFSGSKSGNTASLT |
| | | ISGLQAEDEADYYCSSYTSSSTLYVFGTGTQLTVLGGGGSE |
| | | IVMTQSPATLSLSPGERATLSCRASQDISKYLNWYQQKPGQ |
| | | APRLLIYHTSRLHSGIPARFSGSGSGTDYTLTISSLQPEDFAV |
| | | YFCQQGNTLPYTFGQGTKLEIKGGGGSGGGGSGGGGSQVQ |
| | | LQESGPGLVKPSETLSLTCTVSGVSLPDYGVSWIRQPPGKG |
| | | LEWIGVIWGSETTYYQSSLKSRVTISKDNSKNQVSLKLSSV |
| | | TAADTAVYYCAKHYYYGGSYAMDYWGQGTLVTVSSTTT |
| | | PAPRPPTPAPTIASQPLSLRPEACRPAAGGAVHTRGLDFAC |
| | | DIYIWAPLAGTCGVLLLSLVITLYCKRGRKKLLYIFKQPFM |
| | | RPVQTTQEEDGCSCRFPEEEEGGCELRVKFSRSADAPAYQQ |
| | | GQNQLYNELNLGRREEYDVLDKRRGRDPEMGGKPRRKNP |
| | | QEGLYNELQKDKMAEAYSEIGMKGERRRGKGHDGLYQGL |
| | | STATKDTYDALHMQALPPR |
| CG#c188 | 817 | atggccctccctgtcaccgccctgctgcttccgctggctcttctgctccacgccgctcggcccc |
| | | agtccgctcttacccaaccggcctcagcctcggggagccccggccagagcgtgaccatttcc |
| | | tgcaccggcacttcatccgacgtgggcggctacaactacgtgtcctggtaccaacagcaccc |
| | | gggaaaggcccccaagctcatgatctacgacgtgtccaacaggccctcgggagtgtccaac |
| | | cggttctcgggttcgaaatcgggaaacacagccagcctgaccatcagcggactgcaggctg |
| | | aagatgaagccgactactactgctcctcctacacctcgtcatccacgctctacgtgttcggcact |
| | | ggaactcagctgactgtgctgggcggaggaggctccgaagtgcagcttcaacaatcaggac |
| | | caggactcgtcaaaccatcacagaccctctccctcacatgtgccatctccggggactccatgtt |
| | | gagcaattccgacacttggaattggattagacaaagcccgtcccggggtctggaatggttggg |
| | | acgcacctaccaccggtctacttggtacgacgactacgcgtcatccgtgcggggaagagtgt |
| | | ccatcaacgtggacacctccaagaaccagtacagcctgcagcttaatgccgtgactcctgag |
| | | gatacgggcgtctactactgcgcccgcgtccgcctgcaagacgggaacagctggagcgatg |
| | | cattcgatgtctggggccagggaactatggtcaccgtgtcgtctggagggggagggagtgaa |
| | | attgtgatgacccagtcacccgccactcttagcctttcacccggtgagcgcgcaaccctgtctt |
| | | gcagagcctcccaagacatctcaaaataccttaattggtatcaacagaagcccggacaggctc |
| | | ctcgccttctgatctaccacaccagccggctccattctggaatccctgccaggttcagcggtag |
| | | cggatctgggaccgactacaccctcactatcagctcactgcagccagaggacttcgctgtcta |
| | | tttctgtcagcaagggaacaccctgccctacacctttggacagggcaccaagctcgagattaa |
| | | aggtggaggtggcagcggaggaggtgggtccggcggtggaggaagccaggtccaactcc |
| | | aagaaagcggaccgggtcttgtgaagccatcagaaactctttcactgacttgtactgtgagcg |
| | | gagtgtctctccccgattacggggtgtcttggatcagacagccaccggggaagggtctggaa |
| | | tggattggagtgatttggggctctgagactacttactaccaatcatccctcaagtcacgcgtcac |
| | | catctcaaaggacaactctaagaatcaggtgtcactgaaactgtcatctgtgaccgcagccga |
| | | caccgccgtgtactattgcgctaagcattactattatggcgggagctacgcaatggattactgg |
| | | ggacagggtactctggtcaccgtgtccagcaccactaccccagcaccgaggccacccaccc |
| | | cggctcctaccatcgcctcccagcctctgtccctgcgtccggaggcatgtagacccgcagct |
| | | ggtggggccgtgcatacccggggtcttgacttcgcctgcgatatctacatttgggcccctctgg |
| | | ctggtacttgcggggtcctgctgctttcactcgtgatcactctttactgtaagcgcggtcggaag |
| | | aagctgctgtacatctttaagcaacccttcatgaggcctgtgcagactactcaagaggaggac |
| | | ggctgttcatgccggttcccagaggaggaggaaggcggctgcgaactgcgcgtgaaattca |
| | | gccgcagcgcagatgctccagcctaccagcaggggcagaaccagctctacaacgaactca |
| | | atcttggtcggagagaggagtacgacgtgctggacaagcggagaggacgggacccagaaa |
| | | tgggcgggaagccgcgcagaaagaatccccaagagggcctgtacaacgagctccaaaag |
| | | gataagatggcagaagcctatagcgagattggtatgaaaggggaacgcagaagaggcaaa |
| | | ggccacgacggactgtaccagggactcagcaccgccaccaaggacacctatgacgctcttc |
| | | acatgcaggccctgccgcctcgg |
| | 818 | MALPVTALLLPLALLLHAARPQSALTQPASASGSPGQSVTI |
| | | SCTGTSSDVGGYNYVSWYQQHPGKAPKLMIYDVSNRPSG |
| | | VSNRFSGSKSGNTASLTISGLQAEDEADYYCSSYTSSSTLY |
| | | VFGTGTQLTVLGGGGSEVQLQQSGPGLVKPSQTLSLTCAIS |
| | | GDSMLSNSDTWNWIRQSPSRGLEWLGRTYHRSTWYDDYA |
| | | SSVRGRVSINVDTSKNQYSLQLNAVTPEDTGVYYCARVRL |
| | | QDGNSWSDAFDVWGQGTMVTVSSGGGGSEIVMTQSPATL |
| | | SLSPGERATLSCRASQDISKYLNWYQQKPGQAPRLLIYHTS |
| | | RLHSGIPARFSGSGSGTDYTLTISSLQPEDFAVYFCQQGNTL |
| | | PYTFGQGTKLEIKGGGGSGGGGSGGGGSQVQLQESGPGLV |
| | | KPSETLSLTCTVSGVSLPDYGVSWIRQPPGKGLEWIGVIWG |
| | | SETTYYQSSLKSRVTISKDNSKNQVSLKLSSVTAADTAVYY |
| | | CAKHYYYGGSYAMDYWGQGTLVTVSSTTTPAPRPPTPAPT |
| | | IASQPLSLRPEACRPAAGGAVHTRGLDFACDIYIWAPLAGT |
| | | CGVLLLSLVITLYCKRGRKKLLYIFKQPFMRPVQTTQEEDG |
| | | CSCRFPEEEEGGCELRVKFSRSADAPAYQQGQNQLYNELN |
| | | LGRREEYDVLDKRRGRDPEMGGKPRRKNPQEGLYNELQK |
| | | DKMAEAYSEIGMKGERRRGKGHDGLYQGLSTATKDTYDA |
| | | LHMQALPPR |
| CG#c224 | 819 | atggccctgcccgtgactgcgctcctgcttccgttggccctgctcctgcatgccgccagacctc |
| | | agtccgctctgactcagccggcctcagcttcggggtcccctggtcaaagcgtcactatttcctg |
| | | taccggaacctcatcagacgtgggcggctacaattacgtgtcctggtaccaacagcaccccg |
| | | gaaaggctcctaagcttatgatctacgacgtgtccaaccggccgtcaggagtgtccaacagat |
| | | tctccggctccaagagcggaaacactgccagcttgaccattagcggcttgcaggccgagga |
| | | cgaagccgactactactgctctagctacacatcctcgtctaccctctacgtgtttggaacgggg |
| | | acccagctgactgtgctcgggggtggaggatcagaggtgcaactccagcagtccggtcctg |
| | | gcctcgtgaaaccgtcccaaaccctgtccctgacttgcgccatctcgggcgactccatgctgt |
| | | ccaattccgacacctggaactggattagacaatcgcctagccggggactcgaatggctgggc |
| | | cggacctaccaccggtccacgtggtatgacgactacgcaagctccgtccggggaagggtgt |
| | | ccattaacgtcgatacctccaagaaccagtacagccttcagctgaacgctgtgacccccgag |
| | | gataccggcgtctactactgtgcaagagtgcgattgcaggatggaaactcgtggtcggacgc |
| | | attcgatgtctggggacagggaactatggtgaccgtgtcctcgggcggaggcgggagcgga |
| | | ggaggaggctctggcggaggaggaagcgagattgtcatgactcagtccccggccacactct |
| | | ccctgtcacccggagaaagagcaaccctgagctgcagggcgtcccaggacatctcgaagta |
| | | cctgaactggtaccagcagaagcctggacaagcaccccgcctcctgatctaccacacctcgc |
| | | ggctgcattcgggaatccccgccagattctcagggagcggatcaggaaccgactacaccct |
| | | gactatctcgagcctgcaaccagaggatttcgccgtgtacttctgccagcaaggaaacaccct |
| | | gccctacacctttggacagggaaccaagctcgagattaaggggggtggtggatcgggaggg |
| | | ggtggatcaggaggaggcggctcacaagtccagctgcaagaatccggtccgggacttgtga |
| | | agccgtccgaaaccctgtcactgacttgcactgtgtccggggtgtcattgcccgactacggcg |
| | | tgagctggattcggcagccccctggaaagggattggaatggatcggcgtgatctggggttcg |
| | | gaaactacctactatcagtcctcactgaagtcccgcgtgaccatcagcaaggataattccaaaa |
| | | accaagtgtctctgaagctctccagcgtcactgccgccgatactgccgtgtactactgcgcca |
| | | agcactactattacggcggttcgtacgccatggactactggggccaagggacactcgtgacc |
| | | gtgtcatccaccactaccccagcaccgaggccacccaccccggctcctaccatcgcctccca |
| | | gcctctgtccctgcgtccggaggcatgtagacccgcagctggtggggccgtgcatacccgg |
| | | ggtcttgacttcgcctgcgatatctacatttgggcccctctggctggtacttgcggggtcctgct |
| | | gctttcactcgtgatcactctttactgtaagcgcggtcggaagaagctgctgtacatctttaagca |
| | | acccttcatgaggcctgtgcagactactcaagaggaggacggctgttcatgccggttcccaga |
| | | ggaggaggaaggcggctgcgaactgcgcgtgaaattcagccgcagcgcagatgctccagc |
| | | ctaccagcaggggcagaaccagctctacaacgaactcaatcttggtcggagagaggagtac |
| | | gacgtgctggacaagcggagaggacgggacccagaaatgggcgggaagccgcgcagaa |
| | | agaatccccaagagggcctgtacaacgagctccaaaaggataagatggcagaagcctatag |
| | | cgagattggtatgaaaggggaacgcagaagaggcaaaggccacgacggactgtaccagg |
| | | gactcagcaccgccaccaaggacacctatgacgctcttcacatgcaggccctgccgcctcgg |
| | 820 | MALPVTALLLPLALLLHAARPQSALTQPASASGSPGQSVTI |
| | | SCTGTSSDVGGYNYVSWYQQHPGKAPKLMIYDVSNRPSG |
| | | VSNRFSGSKSGNTASLTISGLQAEDEADYYCSSYTSSSTLY |
| | | VFGTGTQLTVLGGGGSEVQLQQSGPGLVKPSQTLSLTCAIS |
| | | GDSMLSNSDTWNWIRQSPSRGLEWLGRTYHRSTWYDDYA |
| | | SSVRGRVSINVDTSKNQYSLQLNAVTPEDTGVYYCARVRL |
| | | QDGNSWSDAFDVWGQGTMVTVSSGGGGSGGGGSGGGGS |
| | | EIVMTQSPATLSLSPGERATLSCRASQDISKYLNWYQQKPG |
| | | QAPRLLIYHTSRLHSGIPARFSGSGSGTDYTLTISSLQPEDFA |
| | | VYFCQQGNTLPYTFGQGTKLEIKGGGGSGGGGSGGGGSQV |
| | | QLQESGPGLVKPSETLSLTCTVSGVSLPDYGVSWIRQPPGK |
| | | GLEWIGVIWGSETTYYQSSLKSRVTISKDNSKNQVSLKLSS |
| | | VTAADTAVYYCAKHYYYGGSYAMDYWGQGTLVTVSSTT |
| | | TPAPRPPTPAPTIASQPLSLRPEACRPAAGGAVHTRGLDFAC |
| | | DIYIWAPLAGTCGVLLLSLVITLYCKRGRKKLLYIFKQPFM |
| | | RPVQTTQEEDGCSCRFPEEEEGGCELRVKFSRSADAPAYQQ |
| | | GQNQLYNELNLGRREEYDVLDKRRGRDPEMGGKPRRKNP |
| | | QEGLYNELQKDKMAEAYSEIGMKGERRRGKGHDGLYQGL |
| | | STATKDTYDALHMQALPPR |
| CG#c227 | 821 | atggccctgcccgtgactgcgctcctgcttccgttggccctgctcctgcatgccgccagacctc |
| | | agtccgctctgactcagccggcctcagcttcggggtcccctggtcaaagcgtcactatttcctg |
| | | taccggaacctcatcagacgtgggcggctacaattacgtgtcctggtaccaacagcaccccg |
| | | gaaaggctcctaagcttatgatctacgacgtgtccaaccggccgtcaggagtgtccaacagat |
| | | tctccggctccaagagcggaaacactgccagcttgaccattagcggcttgcaggccgagga |
| | | cgaagccgactactactgctctagctacacatcctcgtctaccctctacgtgtttggaacgggg |
| | | acccagctgactgtgctcgggggtggaggatcagaggtgcaactccagcagtccggtcctg |
| | | gcctcgtgaaaccgtcccaaaccctgtccctgacttgcgccatctcgggcgactccatgctgt |
| | | ccaattccgacacctggaactggattagacaatcgcctagccggggactcgaatggctgggc |
| | | cggacctaccaccggtccacgtggtatgacgactacgcaagctccgtccggggaagggtgt |
| | | ccattaacgtcgatacctccaagaaccagtacagccttcagctgaacgctgtgacccccgag |
| | | gataccggcgtctactactgtgcaagagtgcgattgcaggatggaaactcgtggtcggacgc |
| | | attcgatgtctggggacagggaactatggtcactgtgtcctccggcggtggaggctcggggg |
| | | ggggcggctcaggaggaggcggctcacaagtccagctgcaagaatccggtccgggacttg |
| | | tgaagccgtccgaaaccctgtcactgacttgcactgtgtccggggtgtcattgcccgactacg |
| | | gcgtgagctggattcggcagccccctggaaagggattggaatggatcggcgtgatctggggt |
| | | tcggaaactacctactatcagtcctcactgaagtcccgcgtgaccatcagcaaggataattcca |
| | | aaaaccaagtgtctctgaagctctccagcgtcactgccgccgatactgccgtgtactactgcg |
| | | ccaagcactactattacggcggttcgtacgccatggactactggggacaaggcactcttgtga |
| | | ctgtgtcaagcggcggtggagggagcggtgggggcggttcaggaggaggcggatcagag |
| | | atcgtgatgacccaatccccagccaccctgtccctcagccctggagaaagagccaccctgag |
| | | ctgccgggcctcccaggatatcagcaagtacttgaactggtaccaacaaaagccggggcag |
| | | gcgccccggctcctgatctaccacacctcgcgcctccactcaggtatccccgccagattctca |
| | | gggagcggctccggtactgactacaccctgactatttcctcactgcagccagaggactttgcc |
| | | gtgtacttctgccagcagggaaacactctgccgtacaccttcgggcagggaacgaagcttga |
| | | aattaagaccactaccccagcaccgaggccacccaccccggctcctaccatcgcctcccag |
| | | cctctgtccctgcgtccggaggcatgtagacccgcagctggtggggccgtgcatacccggg |
| | | gtcttgacttcgcctgcgatatctacatttgggcccctctggctggtacttgcggggtcctgctg |
| | | ctttcactcgtgatcactctttactgtaagcgcggtcggaagaagctgctgtacatctttaagcaa |
| | | cccttcatgaggcctgtgcagactactcaagaggaggacggctgttcatgccggttcccaga |
| | | ggaggaggaaggcggctgcgaactgcgcgtgaaattcagccgcagcgcagatgctccagc |
| | | ctaccagcaggggcagaaccagctctacaacgaactcaatcttggtcggagagaggagtac |
| | | gacgtgctggacaagcggagaggacgggacccagaaatgggcgggaagccgcgcagaa |
| | | agaatccccaagagggcctgtacaacgagctccaaaaggataagatggcagaagcctatag |
| | | cgagattggtatgaaaggggaacgcagaagaggcaaaggccacgacggactgtaccagg |
| | | gactcagcaccgccaccaaggacacctatgacgctcttcacatgcaggccctgccgcctcgg |
| | 822 | MALPVTALLLPLALLLHAARPQSALTQPASASGSPGQSVTI |
| | | SCTGTSSDVGGYNYVSWYQQHPGKAPKLMIYDVSNRPSG |
| | | VSNRFSGSKSGNTASLTISGLQAEDEADYYCSSYTSSSTLY |
| | | VFGTGTQLTVLGGGGSEVQLQQSGPGLVKPSQTLSLTCAIS |
| | | GDSMLSNSDTWNWIRQSPSRGLEWLGRTYHRSTWYDDYA |
| | | SSVRGRVSINVDTSKNQYSLQLNAVTPEDTGVYYCARVRL |
| | | QDGNSWSDAFDVWGQGTMVTVSSGGGGSGGGGSGGGGS |
| | | QVQLQESGPGLVKPSETLSLTCTVSGVSLPDYGVSWIRQPP |
| | | GKGLEWIGVIWGSETTYYQSSLKSRVTISKDNSKNQVSLKL |
| | | SSVTAADTAVYYCAKHYYYGGSYAMDYWGQGTLVTVSS |
| | | GGGGSGGGGSGGGGSEIVMTQSPATLSLSPGERATLSCRAS |
| | | QDISKYLNWYQQKPGQAPRLLIYHTSRLHSGIPARFSGSGS |
| | | GTDYTLTISSLQPEDFAVYFCQQGNTLPYTFGQGTKLEIKTT |
| | | TPAPRPPTPAPTIASQPLSLRPEACRPAAGGAVHTRGLDFAC |
| | | DIYIWAPLAGTCGVLLLSLVITLYCKRGRKKLLYIFKQPFM |
| | | RPVQTTQEEDGCSCRFPEEEEGGCELRVKFSRSADAPAYQQ |
| | | GQNQLYNELNLGRREEYDVLDKRRGRDPEMGGKPRRKNP |
| | | QEGLYNELQKDKMAEAYSEIGMKGERRRGKGHDGLYQGL |
| | | STATKDTYDALHMQALPPR |

Dual CD19-CD22 CARS
CG#c201

| | | |
|---|---|---|
| Full length | 823 | atggccctccctgtcaccgccctgctgcttccgctggctcttctgctccacgccgctcggcccg |
| CD19-CD22 | | aagtgcagctgcagcagtcagggcctggcctggtcaagccgtcgcagaccctctccctgac |
| Dual CAR | | atgcgccattagcggggactccatgctgagcaactcggacacctggaactggattcggcagt |
| nucleic acid | | ccccttcccggggactcgagtggctcggacgcacctaccatcggagcacttggtacgacga |
| | | ctacgcctcctccgtgagaggtcgcgtgtcgatcaacgtggatacctcgaagaaccagtatag |
| | | cttgcaactgaacgccgtgacccctgaggataccggagtgtactattgtgcgagagtcaggct |
| | | gcaagacggaaactcctggtccgacgcatttgatgtctggggacagggtactatggtcacggt |
| | | gtcatctggaggcggaggatcgcaaagcgccctgactcagccggcttcggctagcggttca |
| | | ccggggcagtccgtgactatctcctgcaccgggacttcctccgacgtgggaggctacaattac |
| | | gtgtcctggtaccagcaacaccccggcaaagccccaaagctgatgatctacgacgtcagcaa |
| | | cagacccagcggagtgtccaaccggttcagcggctccaagtccggcaacaccgcctccctg |
| | | accatcagcgggcttcaggccgaagatgaggcggattactactgctcctcgtacacctcaag |
| | | ctcaactctgtacgtgttcggcaccggtactcagctcaccgtgctgaccactaccccagcacc |
| | | gaggccacccaccccggctcctaccatcgcctcccagcctctgtccctgcgtccggaggcat |
| | | gtagacccgcagctggtggggccgtgcatacccggggtcttgacttcgcctgcgatatctaca |
| | | tttgggcccctctggctggtacttgcggggtcctgctgctttcactcgtgatcactctttactgtaa |
| | | gcgcggtcggaagaagctgctgtacatctttaagcaacccttcatgaggcctgtgcagactac |
| | | tcaagaggaggacggctgttcatgccggttcccagaggaggaggaaggcggctgcgaact |
| | | gcgcgtgaaattcagccgcagcgcagatgctccagcctaccagcaggggcagaaccagct |
| | | ctacaacgaactcaatcttggtcggagagaggagtacgacgtgctggacaagcggagagga |
| | | cgggacccagaaatgggcgggaagccgcgcagaaagaatccccaagagggcctgtacaa |
| | | cgagctccaaaaggataagatggcagaagcctatagcgagattggtatgaaaggggaacgc |
| | | agaagaggcaaaggccacgacggactgtaccagggactcagcaccgccaccaaggacac |
| | | ctatgacgctcttcacatgcaggccctgccgcctcggggaagcggagctactaacttcagcct |
| | | gctgaagcaggctggagacgtggaggagaaccctggacctatggccttaccagtgaccgcc |
| | | ttgctcctgccgctggccttgctgctccacgccgccaggccggaaattgtgatgacccagtca |
| | | cccgccactcttagcctttcacccggtgagcgcgcaaccctgtcttgcagagcctcccaagac |
| | | atctcaaaataccttaattggtatcaacagaagcccggacaggctcctcgccttctgatctacca |
| | | caccagccggctccattctggaatccctgccaggttcagcggtagcggatctgggaccgact |
| | | acaccctcactatcagctcactgcagccagaggacttcgctgtctatttctgtcagcaagggaa |
| | | caccctgccctacacctttggacagggcaccaagctcgagattaaaggtggaggtggcagc |
| | | ggaggaggtgggtccggcggtggaggaagccaggtccaactccaagaaagcggaccgg |
| | | gtcttgtgaagccatcagaaactctttcactgacttgtactgtgagcggagtgtctctccccgatt |
| | | acggggtgtcttggatcagacagccaccggggaagggtctggaatggattggagtgatttgg |
| | | ggctctgagactacttactaccaatcatccctcaagtcacgcgtcaccatctcaaaggacaact |
| | | ctaagaatcaggtgtcactgaaactgtcatctgtgaccgcagccgacaccgccgtgtactattg |
| | | cgctaagcattactattatggcgggagctacgcaatggattactggggacagggtactctggt |
| | | caccgtgtccagcaccacgacgccagcgccgcgaccaccaacaccggcgcccaccatcg |
| | | cgtcgcagcccctgtccctgcgcccagaggcgtgccggccagcggcggggggcgcagtg |
| | | cacacgagggggctggacttcgcctgtgatatctacatctgggcgcccttggccgggacttgt |
| | | ggggtccttctcctgtcactggttatcaccctttactgcaaacggggcagaaagaaactcctgt |
| | | atatattcaaacaaccatttatgagaccagtacaaactactcaagaggaagatggctgtagctg |
| | | ccgatttccagaagaagaagaaggaggatgtgaactgagagtgaagttcagcaggagcgca |
| | | gacgcccccgcgtaccagcagggccagaaccagctctataacgagctcaatctaggacgaa |
| | | gagaggagtacgatgttttggacaagagacgtggccgggaccctgagatggggggaaagc |
| | | cgagaaggaagaaccctcaggaaggcctgtacaatgaactgcagaaagataagatggcgg |
| | | aggcctacagtgagattgggatgaaaggcgagcgccggaggggcaaggggcacgatggc |
| | | ctttaccagggtctcagtacagccaccaaggacacctacgacgcccttcacatgcaggccct |
| | | gccccctcgc |
| Full length | 824 | MALPVTALLLPLALLLHAARPEVQLQQSGPGLVKPSQTLSL |
| CD19-CD22 | | TCAISGDSMLSNSDTWNWIRQSPSRGLEWLGRTYHRSTWY |
| Dual CAR | | DDYASSVRGRVSINVDTSKNQYSLQLNAVTPEDTGVYYCA |
| amino acid | | RVRLQDGNSWSDAFDVWGQGTMVTVSSGGGGSQSALTQP |
| | | ASASGSPGQSVTISCTGTSSDVGGYNYVSWYQQHPGKAPK |
| | | LMIYDVSNRPSGVSNRFSGSKSGNTASLTISGLQAEDEADY |
| | | YCSSYTSSSTLYVFGTGTQLTVLTTTPAPRPPTPAPTIASQPL |
| | | SLRPEACRPAAGGAVHTRGLDFACDIYIWAPLAGTCGVLL |
| | | LSLVITLYCKRGRKKLLYIFKQPFMRPVQTTQEEDGCSCRF |
| | | PEEEEGGCELRVKFSRSADAPAYQQGQNQLYNELNLGRRE |
| | | EYDVLDKRRGRDPEMGGKPRRKNPQEGLYNELQKDKMA |
| | | EAYSEIGMKGERRRGKGHDGLYQGLSTATKDTYDALHMQ |
| | | ALPPRGSGATNFSLLKQAGDVEENPGPMALPVTALLLPLAL |
| | | LLHAARPEIVMTQSPATLSLSPGERATLSCRASQDISKYLN |
| | | WYQQKPGQAPRLLIYHTSRLHSGIPARFSGSGSGTDYTLTIS |
| | | SLOPEDFAVYFCQQGNTLPYTFGQGTKLEIKGGGGSGGGG |
| | | SGGGGSQVQLQESGPGLVKPSETLSLTCTVSGVSLPDYGVS |
| | | WIRQPPGKGLEWIGVIWGSETTYYQSSLKSRVTISKDNSKN |
| | | QVSLKLSSVTAADTAVYYCAKHYYYGGSYAMDYWGQGT |
| | | LVTVSSTTTPAPRPPTPAPTIASQPLSLRPEACRPAAGGAVH |
| | | TRGLDFACDIYIWAPLAGTCGVLLLSLVITLYCKRGRKKLL |
| | | YIFKQPFMRPVQTTQEEDGCSCRFPEEEEGGCELRVKFSRS |
| | | ADAPAYQQGQNQLYNELNLGRREEYDVLDKRRGRDPEM |
| | | GGKPRRKNPQEGLYNELQKDKMAEAYSEIGMKGERRRGK |
| | | GHDGLYQGLSTATKDTYDALHMQALPPR |
| CD22 CAR | 825 | MALPVTALLLPLALLLHAARPEVQLQQSGPGLVKPSQTLSL |
| (with P2A | | TCAISGDSMLSNSDTWNWIRQSPSRGLEWLGRTYHRSTWY |
| site) | | DDYASSVRGRVSINVDTSKNQYSLQLNAVTPEDTGVYYCA |
| | | RVRLQDGNSWSDAFDVWGQGTMVTVSSGGGGSQSALTQP |
| | | ASASGSPGQSVTISCTGTSSDVGGYNYVSWYQQHPGKAPK |
| | | LMIYDVSNRPSGVSNRFSGSKSGNTASLTISGLQAEDEADY |
| | | YCSSYTSSSTLYVFGTGTQLTVLTTTPAPRPPTPAPTIASQPL |
| | | SLRPEACRPAAGGAVHTRGLDFACDIYIWAPLAGTCGVLL |
| | | LSLVITLYCKRGRKKLLYIFKQPFMRPVQTTQEEDGCSCRF |
| | | PEEEEGGCELRVKFSRSADAPAYQQGQNQLYNELNLGRRE |
| | | EYDVLDKRRGRDPEMGGKPRRKNPQEGLYNELQKDKMA |
| | | EAYSEIGMKGERRRGKGHDGLYQGLSTATKDTYDALHMQ |
| | | ALPPRGSGATNFSLLKQAGDVEENPG |
| CD19 CAR | 826 | PMALPVTALLLPLALLLHAARPEIVMTQSPATLSLSPGERA |
| | | TLSCRASQDISKYLNWYQQKPGQAPRLLIYHTSRLHSGIPA |
| | | RFSGSGSGTDYTLTISSLQPEDFAVYFCQQGNTLPYTFGQG |
| | | TKLEIKGGGGSGGGGSGGGGSQVQLQESGPGLVKPSETLSL |
| | | TCTVSGVSLPDYGVSWIRQPPGKGLEWIGVIWGSETTYYQS |
| | | SLKSRVTISKDNSKNQVSLKLSSVTAADTAVYYCAKHYYY |
| | | GGSYAMDYWGQGTLVTVSSTTTPAPRPPTPAPTIASQPLSL |
| | | RPEACRPAAGGAVHTRGLDFACDIYIWAPLAGTCGVLLLS |
| | | LVITLYCKRGRKKLLYIFKQPFMRPVQTTQEEDGCSCRFPE |
| | | EEEGGCELRVKFSRSADAPAYQQGQNQLYNELNLGRREEY |
| | | DVLDKRRGRDPEMGGKPRRKNPQEGLYNELQKDKMAEA |
| | | YSEIGMKGERRRGKGHDGLYQGLSTATKDTYDALHMQAL |
| | | PPR |

CG#c203

| | | |
|---|---|---|
| Full length | 827 | atggccttaccagtgaccgccttgctcctgccgctggccttgctgctccacgccgccaggccg |
| CD19-CD22 | | gaaattgtgatgacccagtcacccgccactcttagcctttcacccggtgagcgcgcaaccctg |
| Dual CAR | | tcttgcagagcctcccaagacatctcaaaataccttaattggtatcaacagaagcccggacag |
| nucleic acid | | gctcctcgccttctgatctaccacaccagccggctccattctggaatccctgccaggttcagcg |
| | | gtagcggatctgggaccgactacaccctcactatcagctcactgcagccagaggacttcgct |
| | | gtctatttctgtcagcaagggaacaccctgccctacacctttggacagggcaccaagctcgag |
| | | attaaaggtggaggtggcagcggaggaggtgggtccggcggtggaggaagccaggtcca |
| | | actccaagaaagcggaccgggtcttgtgaagccatcagaaactctttcactgacttgtactgtg |
| | | agcggagtgtctctccccgattacggggtgtcttggatcagacagccaccggggaagggtct |
| | | ggaatggattggagtgatttggggctctgagactacttactaccaatcatccctcaagtcacgc |
| | | gtcaccatctcaaaggacaactctaagaatcaggtgtcactgaaactgtcatctgtgaccgcag |
| | | ccgacaccgccgtgtactattgcgctaagcattactattatggcgggagctacgcaatggatta |
| | | ctggggacagggtactctggtcaccgtgtccagcaccacgacgccagcgccgcgaccacc |
| | | aacaccggcgcccaccatcgcgtcgcagcccctgtccctgcgcccagaggcgtgccggcc |
| | | agcggcggggggcgcagtgcacacgagggggctggacttcgcctgtgatatctacatctgg |
| | | gcgcccttggccgggacttgtggggtccttctcctgtcactggttatcaccctttactgcaaacg |
| | | gggcagaaagaaactcctgtatatattcaaacaaccatttatgagaccagtacaaactactcaa |
| | | gaggaagatggctgtagctgccgatttccagaagaagaagaaggaggatgtgaactgagag |
| | | tgaagttcagcaggagcgcagacgcccccgcgtaccagcagggccagaaccagctctata |
| | | acgagctcaatctaggacgaagagaggagtacgatgttttggacaagagacgtggccggga |
| | | ccctgagatggggggaaagccgagaaggaagaaccctcaggaaggcctgtacaatgaact |
| | | gcagaaagataagatggcggaggcctacagtgagattgggatgaaaggcgagcgccgga |
| | | ggggcaaggggcacgatggcctttaccagggtctcagtacagccaccaaggacacctacga |
| | | cgcccttcacatgcaggccctgccccctcgcggaagcggagctactaacttcagcctgctga |
| | | agcaggctggagacgtggaggagaaccctggacctatggccctccctgtcaccgccctgct |
| | | gcttccgctggctcttctgctccacgccgctcggcccgaagtgcagctgcagcagtcagggc |
| | | ctggcctggtcaagccgtcgcagaccctctccctgacatgcgccattagcggggactccatg |
| | | ctgagcaactcggacacctggaactggattcggcagtccccttcccggggactcgagtggct |
| | | cggacgcacctaccatcggagcacttggtacgacgactacgcctcctccgtgagaggtcgc |
| | | gtgtcgatcaacgtggatacctcgaagaaccagtatagcttgcaactgaacgccgtgacccct |
| | | gaggataccggagtgtactattgtgcgagagtcaggctgcaagacggaaactcctggtccga |
| | | cgcatttgatgtctggggacagggtactatggtcacggtgtcatctggaggcggaggatcgca |
| | | aagcgccctgactcagccggcttcggctagcggttcaccggggcagtccgtgactatctcct |
| | | gcaccgggacttcctccgacgtgggaggctacaattacgtgtcctggtaccagcaacacccc |
| | | ggcaaagccccaaagctgatgatctacgacgtcagcaacagacccagcggagtgtccaacc |
| | | ggttcagcggctccaagtccggcaacaccgcctccctgaccatcagcgggcttcaggccga |
| | | agatgaggcggattactactgctcctcgtacacctcaagctcaactctgtacgtgttcggcacc |
| | | ggtactcagctcaccgtgctgaccactaccccagcaccgaggccacccaccccggctccta |
| | | ccatcgcctcccagcctctgtccctgcgtccggaggcatgtagacccgcagctggtggggcc |
| | | gtgcatacccggggtcttgacttcgcctgcgatatctacatttgggcccctctggctggtacttg |
| | | cggggtcctgctgctttcactcgtgatcactctttactgtaagcgcggtcggaagaagctgctgt |
| | | acatctttaagcaacccttcatgaggcctgtgcagactactcaagaggaggacggctgttcatg |
| | | ccggttcccagaggaggaggaaggggctgcgaactgcgcgtgaaattcagccgcagcgc |
| | | agatgctccagcctaccagcaggggcagaaccagctctacaacgaactcaatcttggtcgga |
| | | gagaggagtacgacgtgctggacaagcggagaggacgggacccagaaatgggcgggaa |
| | | gccgcgcagaaagaatccccaagagggcctgtacaacgagctccaaaaggataagatggc |
| | | agaagcctatagcgagattggtatgaaaggggaacgcagaagaggcaaaggccacgacg |
| | | gactgtaccagggactcagcaccgccaccaaggacacctatgacgctcttcacatgcaggcc |
| | | ctgccgcctcgg |
| Full length | 828 | MALPVTALLLPLALLLHAARPEIVMTQSPATLSLSPGERAT |
| CD19-CD22 | | LSCRASQDISKYLNWYQQKPGQAPRLLIYHTSRLHSGIPAR |
| Dual CAR | | FSGSGSGTDYTLTISSLQPEDFAVYFCQQGNTLPYTFGQGT |
| amino acid | | KLEIKGGGGSGGGGSGGGGSQVQLQESGPGLVKPSETLSLT |
| | | CTVSGVSLPDYGVSWIRQPPGKGLEWIGVIWGSETTYYQSS |
| | | LKSRVTISKDNSKNQVSLKLSSVTAADTAVYYCAKHYYYG |
| | | GSYAMDYWGQGTLVTVSSTTTPAPRPPTPAPTIASQPLSLR |
| | | PEACRPAAGGAVHTRGLDFACDIYIWAPLAGTCGVLLLSL |
| | | VITLYCKRGRKKLLYIFKQPFMRPVQTTQEEDGCSCRFPEE |
| | | EEGGCELRVKFSRSADAPAYQQGQNQLYNELNLGRREEY |
| | | DVLDKRRGRDPEMGGKPRRKNPQEGLYNELQKDKMAEA |
| | | YSEIGMKGERRRGKGHDGLYQGLSTATKDTYDALHMQAL |
| | | PPRGSGATNFSLLKQAGDVEENPGPMALPVTALLLPLALLL |
| | | HAARPEVQLQQSGPGLVKPSQTLSLTCAISGDSMLSNSDT |
| | | WNWIRQSPSRGLEWLGRTYHRSTWYDDYASSVRGRVSIN |
| | | VDTSKNQYSLQLNAVTPEDTGVYYCARVRLQDGNSWSDA |
| | | FDVWGQGTMVTVSSGGGGSQSALTQPASASGSPGQSVTIS |
| | | CTGTSSDVGGYNYVSWYQQHPGKAPKLMIYDVSNRPSGV |
| | | SNRFSGSKSGNTASLTISGLQAEDEADYYCSSYTSSSTLYVF |
| | | GTGTQLTVLTTTPAPRPPTPAPTIASQPLSLRPEACRPAAGG |
| | | AVHTRGLDFACDIYIWAPLAGTCGVLLLSLVITLYCKRGRK |
| | | KLLYIFKQPFMRPVQTTQEEDGCSCRFPEEEEGGCELRVKF |
| | | SRSADAPAYQQGQNQLYNELNLGRREEYDVLDKRRGRDP |
| | | EMGGKPRRKNPQEGLYNELQKDKMAEAYSEIGMKGERRR |
| | | GKGHDGLYQGLSTATKDTYDALHMQALPPR |
| CD19 CAR | 829 | MALPVTALLLPLALLLHAARPEIVMTQSPATLSLSPGERAT |
| (with P2A | | LSCRASQDISKYLNWYQQKPGQAPRLLIYHTSRLHSGIPAR |
| site) | | FSGSGSGTDYTLTISSLQPEDFAVYFCQQGNTLPYTFGQGT |
| | | KLEIKGGGGSGGGGSGGGGSQVQLQESGPGLVKPSETLSLT |
| | | CTVSGVSLPDYGVSWIRQPPGKGLEWIGVIWGSETTYYQSS |
| | | LKSRVTISKDNSKNQVSLKLSSVTAADTAVYYCAKHYYYG |
| | | GSYAMDYWGQGTLVTVSSTTTPAPRPPTPAPTIASQPLSLR |
| | | PEACRPAAGGAVHTRGLDFACDIYIWAPLAGTCGVLLLSL |
| | | VITLYCKRGRKKLLYIFKQPFMRPVQTTQEEDGCSCRFPEE |
| | | EEGGCELRVKFSRSADAPAYQQGQNQLYNELNLGRREEY |
| | | DVLDKRRGRDPEMGGKPRRKNPQEGLYNELQKDKMAEA |
| | | YSEIGMKGERRRGKGHDGLYQGLSTATKDTYDALHMQAL |
| | | PPRGSGATNFSLLKQAGDVEENPG |
| CD22 CAR | 830 | PMALPVTALLLPLALLLHAARPEVQLQQSGPGLVKPSQTLS |
| | | LTCAISGDSMLSNSDTWNWIRQSPSRGLEWLGRTYHRSTW |
| | | YDDYASSVRGRVSINVDTSKNQYSLQLNAVTPEDTGVYYC |
| | | ARVRLQDGNSWSDAFDVWGQGTMVTVSSGGGGSQSALT |
| | | QPASASGSPGQSVTISCTGTSSDVGGYNYVSWYQQHPGKA |
| | | PKLMIYDVSNRPSGVSNRFSGSKSGNTASLTISGLQAEDEA |
| | | DYYCSSYTSSSTLYVFGTGTQLTVLTTTPAPRPPTPAPTIAS |
| | | QPLSLRPEACRPAAGGAVHTRGLDFACDIYIWAPLAGTCG |
| | | VLLLSLVITLYCKRGRKKLLYIFKQPFMRPVQTTQEEDGCS |
| | | CRFPEEEEGGCELRVKFSRSADAPAYQQGQNQLYNELNLG |
| | | RREEYDVLDKRRGRDPEMGGKPRRKNPQEGLYNELQKDK |
| | | MAEAYSEIGMKGERRRGKGHDGLYQGLSTATKDTYDALH |
| | | MQALPPR |

CG#c230

| | | |
|---|---|---|
| Full length | 831 | atggcacttcccgtcaccgccctgctgctcccactcgccctccttctgcacgccgcccgcccc |
| CD19-CD22 | | gaagtgcagctgcagcagtcaggaccgggcctggtcaaaccttcgcagactctgtccctgac |
| Dual CAR | | ttgcgctataagcggggactccatgctgagcaattcggacacttggaactggattcgccaaag |
| nucleic acid | | ccccagccggggtctggaatggctgggaaggacctaccatcgctctacttggtacgacgact |
| | | acgccagctccgtgcgaggacgcgtgtccatcaacgtggacacctccaagaaccagtactc |
| | | gcttcaactcaacgcagtgacccctgaagataccggagtctactattgcgcccgcgtgcggct |
| | | ccaggacgggaactcctggtcggacgctttcgatgtctggggacagggcactatggtcaccg |
| | | tcagctccggcggcggcggtagccaatcggcgctgacacagccggcttccgcctcgggatc |
| | | gcctggacagtcggtgaccatctcgtgcactggaacctcctccgacgtgggcggctacaatta |
| | | tgtgtcatggtaccagcagcacccgggaaaggcccctaagctgatgatctacgacgtgtcca |
| | | atagacctagcggggtgtcaaacagattctccggatccaaatccggaaacactgcctccctga |
| | | ccatttccggactgcaggccgaggacgaagccgattactactgctcctcttacacctcctcatc |
| | | caccctctacgtgtttgggactgggacccagctgaccgtcctcactaccaccccggccccgc |
| | | ggccccctacaccggcaccgactattgccagccagcctctctcgctgcggccggaggcctg |
| | | ccgcccagccgccggcggagccgtgcacacccgcggtctggacttcgcgtgcgatatctac |
| | | atctgggctccgctggccgggacttgtggcgtgctgctgctgtctctggtcatcacactgtact |
| | | gcaagcgcggaagaaagaagctgctctacatcttcaagcaacccttcatgcggcctgtgcag |
| | | accacccaggaagaggatggctgctcctgccggttcccggaggaagaagagggcggatgc |
| | | gaactgcgcgtgaagttcagccgaagcgccgacgccccggcctaccagcagggccagaa |
| | | ccaactgtacaacgaactcaacctgggtcggagagaagagtacgacgtgctggacaaaaga |
| | | cgcggcagggaccccgagatgggcggaaagcctcgccgcaagaacccgcaggagggcc |
| | | tctacaacgagctgcagaaggacaagatggccgaagcctactcagagatcggcatgaaggg |
| | | ggagcggaggcgcgggaagggccacgacggtttgtaccaaggactttccactgcgaccaa |
| | | ggacacctacgatgccctccatatgcaagccctgccgccccggggttccggagctaccaact |
| | | tctcgctgttgaagcaggccggagatgtcgaggaaaacccgggacctatggccctgccagt |
| | | gaccgcgctcctgctgcccctggctctgctgcttcacgcggcccggcctgagattgtgatgac |
| | | tcagagcccggcgaccctgtccctgtcccccggggagagagcaaccctgtcgtgccgggc |
| | | ctcccaagacatctcaaagtacctcaattggtatcagcagaagccaggacaggctccacggtt |
| | | gctgatctaccacacttcgagactgcactcaggaatccccgcgcggttttccggttccggctcc |
| | | gggaccgactacaccctgaccatcagctcgctccagcctgaggatttcgcagtgtacttctgtc |
| | | agcaaggaaacacccttccatacaccttcggacagggtaccaagctggaaatcaagggagg |
| | | aggaggatctgggggcggtggttccggaggcggtggaagccaagtgcagctccaggaaa |
| | | gcggacccgggctggtcaagccgagcgaaaccctctcactgacttgtactgtgtccggagtg |
| | | tccctgcctgactatggagtgtcctggatccgacagccccccggaaagggtctggagtggatt |
| | | ggggtcatctggggctccgaaactacctactaccagagcagcctcaagagccgggtcaccat |
| | | ttcaaaggataactccaagaatcaagtgtccctgaagctgtcctcagtgacagccgcagacac |
| | | cgccgtgtactactgcgccaagcactactactacggaggctcctacgcaatggactactggg |
| | | gacaaggcactttggtcactgtgtcaagcaccaccacccctgcgcctcggcctcctaccccg |
| | | gctcccactatcgcgagccagccgctgagcctgcggcctgaggcttgccgaccggccgctg |
| | | gcggcgccgtgcatactcggggcctcgactttgcctgtgacatctacatctgggcccccctgg |
| | | ccggaacgtgcggagtgctgctgctgtcgctggtcattaccctgtattgcaaacgcggaagga |
| | | agaagctgttgtacattttcaagcagcccttcatgcgcccggtgcaaactactcaggaggaag |
| | | atggctgttcctgtcggttccccgaagaggaagaaggcggctgcgagttgagggtcaagttct |
| | | cccggtccgccgatgctcccgcctaccaacaggggcagaaccagctttataacgaactgaac |
| | | ctgggcaggagggaggaatatgatgtgttggataagcgccggggccgggacccagaaatg |
| | | gggggaaagcccagaagaaagaaccctcaagagggactttacaacgaattgcagaaagac |
| | | aaaatggccgaggcctactccgagattgggatgaagggcgaaagacggagaggaaaggg |
| | | gcacgacgggctctaccagggactcagcaccgccaccaaagatacctacgacgccctgcat |
| | | atgcaggcgctgccgccgcgc |
| Full length | 824 | MALPVTALLLPLALLLHAARPEVQLQQSGPGLVKPSQTLSL |
| CD19-CD22 | | TCAISGDSMLSNSDTWNWIRQSPSRGLEWLGRTYHRSTWY |
| Dual CAR | | DDYASSVRGRVSINVDTSKNQYSLQLNAVTPEDTGVYYCA |
| amino acid | | RVRLQDGNSWSDAFDVWGQGTMVTVSSGGGGSQSALTQP |
| | | ASASGSPGQSVTISCTGTSSDVGGYNYVSWYQQHPGKAPK |
| | | LMIYDVSNRPSGVSNRFSGSKSGNTASLTISGLQAEDEADY |
| | | YCSSYTSSSTLYVFGTGTQLTVLTTTPAPRPPTPAPTIASQPL |
| | | SLRPEACRPAAGGAVHTRGLDFACDIYIWAPLAGTCGVLL |
| | | LSLVITLYCKRGRKKLLYIFKQPFMRPVQTTQEEDGCSCRF |
| | | PEEEEGGCELRVKFSRSADAPAYQQGQNQLYNELNLGRRE |
| | | EYDVLDKRRGRDPEMGGKPRRKNPQEGLYNELQKDKMA |
| | | EAYSEIGMKGERRRGKGHDGLYQGLSTATKDTYDALHMQ |
| | | ALPPRGSGATNFSLLKQAGDVEENPGPMALPVTALLLPLAL |
| | | LLHAARPEIVMTQSPATLSLSPGERATLSCRASQDISKYLN |
| | | WYQQKPGQAPRLLIYHTSRLHSGIPARFSGSGSGTDYTLTIS |
| | | SLOPEDFAVYFCQQGNTLPYTFGQGTKLEIKGGGGSGGGG |
| | | SGGGGSQVQLQESGPGLVKPSETLSLTCTVSGVSLPDYGVS |
| | | WIRQPPGKGLEWIGVIWGSETTYYQSSLKSRVTISKDNSKN |
| | | QVSLKLSSVTAADTAVYYCAKHYYYGGSYAMDYWGQGT |
| | | LVTVSSTTTPAPRPPTPAPTIASQPLSLRPEACRPAAGGAVH |
| | | TRGLDFACDIYIWAPLAGTCGVLLLSLVITLYCKRGRKKLL |
| | | YIFKQPFMRPVQTTQEEDGCSCRFPEEEEGGCELRVKFSRS |
| | | ADAPAYQQGQNQLYNELNLGRREEYDVLDKRRGRDPEM |
| | | GGKPRRKNPQEGLYNELQKDKMAEAYSEIGMKGERRRGK |
| | | GHDGLYQGLSTATKDTYDALHMQALPPR |
| CD22 CAR | 825 | MALPVTALLLPLALLLHAARPEVQLQQSGPGLVKPSQTLSL |
| (with P2A | | TCAISGDSMLSNSDTWNWIRQSPSRGLEWLGRTYHRSTWY |
| site) | | DDYASSVRGRVSINVDTSKNQYSLQLNAVTPEDTGVYYCA |
| | | RVRLQDGNSWSDAFDVWGQGTMVTVSSGGGGSQSALTQP |
| | | ASASGSPGQSVTISCTGTSSDVGGYNYVSWYQQHPGKAPK |
| | | LMIYDVSNRPSGVSNRFSGSKSGNTASLTISGLQAEDEADY |
| | | YCSSYTSSSTLYVFGTGTQLTVLTTTPAPRPPTPAPTIASQPL |
| | | SLRPEACRPAAGGAVHTRGLDFACDIYIWAPLAGTCGVLL |
| | | LSLVITLYCKRGRKKLLYIFKQPFMRPVQTTQEEDGCSCRF |
| | | PEEEEGGCELRVKFSRSADAPAYQQGQNQLYNELNLGRRE |
| | | EYDVLDKRRGRDPEMGGKPRRKNPQEGLYNELQKDKMA |
| | | EAYSEIGMKGERRRGKGHDGLYQGLSTATKDTYDALHMQ |
| | | ALPPRGSGATNFSLLKQAGDVEENPG |
| CD19 CAR | 826 | PMALPVTALLLPLALLLHAARPEIVMTQSPATLSLSPGERA |
| | | TLSCRASQDISKYLNWYQQKPGQAPRLLIYHTSRLHSGIPA |
| | | RFSGSGSGTDYTLTISSLQPEDFAVYFCQQGNTLPYTFGQG |
| | | TKLEIKGGGGSGGGGSGGGGSQVQLQESGPGLVKPSETLSL |
| | | TCTVSGVSLPDYGVSWIRQPPGKGLEWIGVIWGSETTYYQS |
| | | SLKSRVTISKDNSKNQVSLKLSSVTAADTAVYYCAKHYYY |
| | | GGSYAMDYWGQGTLVTVSSTTTPAPRPPTPAPTIASQPLSL |
| | | RPEACRPAAGGAVHTRGLDFACDIYIWAPLAGTCGVLLLS |
| | | LVITLYCKRGRKKLLYIFKQPFMRPVQTTQEEDGCSCRFPE |
| | | EEEGGCELRVKFSRSADAPAYQQGQNQLYNELNLGRREEY |
| | | DVLDKRRGRDPEMGGKPRRKNPQEGLYNELQKDKMAEA |
| | | YSEIGMKGERRRGKGHDGLYQGLSTATKDTYDALHMQAL |
| | | PPR |

[0510] CD22 and CD19 CDRs of a dual CAR of the disclosure (e.g., a dual CAR molecule comprising (i) a first CAR that binds to CD22 and (ii) a second CAR that binds to CD 19) are provided in Table 31.

TABLE 31
CD22 and CD19 CDR sequences

| | | |
|---|---|---|
| | SEQ ID | |
| Identifier | NO | Sequence |

CD22 CDRs

| | | |
|---|---|---|
| HCDR1 | 745 | SNSDTWN |
| (Kabat) | | |
| HCDR2 | 746 | RTYHRSTWYDDYASSVRG |
| (Kabat) | | |
| HCDR3 | 748 | VRLQDGNSWSDAFDV |
| (Kabat) | | |
| HCDR1 | 832 | GDSMLSNSD |
| (Chothia) | | |
| HCDR2 | 833 | YHRSTWY |
| (Chothia) | | |
| HCDR3 | 748 | VRLQDGNSWSDAFDV |
| (Chothia) | | |
| HCDR1 | 834 | GDSMLSNSDT |
| (IMGT) | | |
| HCDR2 | 835 | TYHRSTWYD |
| (IMGT) | | |
| HCDR3 | 836 | ARVRLQDGNSWSDAFDV |
| (IMGT) | | |
| LCDR1 | 95 | TGTSSDVGGYNYVS |
| (Kabat) | | |
| LCDR2 | 96 | DVSNRPS |
| (Kabat) | | |
| LCDR3 | 97 | SSYTSSSTLYV |
| (Kabat) | | |
| LCDR1 | 98 | TSSDVGGYNY |
| (Chothia) | | |
| LCDR2 | 99 | DVS |
| (Chothia) | | |
| LCDR3 | 100 | YTSSSTLY |
| (Chothia) | | |
| LCDR1 | 101 | SSDVGGYNY |
| (IMGT) | | |
| LCDR2 | 99 | DVS |
| (IMGT) | | |
| LCDR3 | 97 | SSYTSSSTLYV |
| (IMGT) | | |

CD19 CDRs

| | | |
|---|---|---|
| HCDR1 | 837 | GVSLPDYGVS |
| (Kabat) | | |
| HCDR2 | 838 | VIWGSETTYYSSSLKS |
| (Kabat) | 687 | VIWGSETTYYQSSLKS |
| | 839 | VIWGSETTYYNSSLKS |
| HCDR3 | 762 | HYYYGGSYAMDY |
| (Kabat) | | |
| LCDR1 | 763 | RASQDISKYLN |
| LCDR2 | 764 | HTSRLHS |
| LCDR3 | 300 | QQGNTLPYT |

[0511] Table 32 provides nucleotide and amino acid sequence for CD19 and CD22 binding domains of a dual CAR or a tandem CAR disclosed herein, e.g., a dual CAR or a tandem CAR comprising (i) a first CAR that binds to CD22 and (ii) a second CAR that binds to CD 19.

TABLE 32
CD19 and CD22 binding domains

| | SEQ ID | |
|---|---|---|
| Identifier | NO | Sequence |
| scFv | 840 | gaaattgtgatgacccagtcacccgccactcttagcctttcacccggtgagcgcgcaaccctgt |
| CAR19 in | | cttgcagagcctcccaagacatctcaaaataccttaattggtatcaacagaagcccggacaggc |
| c201, c203 | | tcctcgccttctgatctaccacaccagccggctccattctggaatccctgccaggttcagcggta |
| and tandem | | gcggatctgggaccgactacaccctcactatcagctcactgcagccagaggacttcgctgtcta |
| CARs c171, | | tttctgtcagcaagggaacaccctgccctacacctttggacagggcaccaagctcgagattaaa |
| c182, c188 | | ggtggaggtggcagcggaggaggtgggtccggcggtggaggaagccaggtccaactccaa |
| | | gaaagcggaccgggtcttgtgaagccatcagaaactctttcactgacttgtactgtgagcggag |
| | | tgtctctccccgattacggggtgtcttggatcagacagccaccggggaagggtctggaatggat |
| | | tggagtgatttggggctctgagactacttactaccaatcatccctcaagtcacgcgtcaccatctc |
| | | aaaggacaactctaagaatcaggtgtcactgaaactgtcatctgtgaccgcagccgacaccgc |
| | | cgtgtactattgcgctaagcattactattatggcgggagctacgcaatggattactggggacagg |
| | | gtactctggtcaccgtgtccagc |
| | 758 | EIVMTQSPATLSLSPGERATLSCRASQDISKYLNWYQQKPG |
| | | QAPRLLIYHTSRLHSGIPARFSGSGSGTDYTLTISSLQPEDFA |
| | | VYFCQQGNTLPYTFGQGTKLEIKGGGGSGGGGSGGGGSQV |
| | | QLQESGPGLVKPSETLSLTCTVSGVSLPDYGVSWIRQPPGKG |
| | | LEWIGVIWGSETTYYQSSLKSRVTISKDNSKNQVSLKLSSVT |
| | | AADTAVYYCAKHYYYGGSYAMDYWGQGTLVTVSS |
| scFv | 841 | gagattgtcatgactcagtccccggccacactctccctgtcacccggagaaagagcaaccctg |
| CAR19 in | | agctgcagggcgtcccaggacatctcgaagtacctgaactggtaccagcagaagcctggaca |
| c224 | | agcaccccgcctcctgatctaccacacctcgcggctgcattcgggaatccccgccagattctca |
| | | gggagcggatcaggaaccgactacaccctgactatctcgagcctgcaaccagaggatttcgc |
| | | cgtgtacttctgccagcaaggaaacaccctgccctacacctttggacagggaaccaagctcga |
| | | gattaaggggggtggtggatcgggagggggtggatcaggaggaggcggctcacaagtcca |
| | | gctgcaagaatccggtccgggacttgtgaagccgtccgaaaccctgtcactgacttgcactgtg |
| | | tccggggtgtcattgcccgactacggcgtgagctggattcggcagccccctggaaagggattg |
| | | gaatggatcggcgtgatctggggttcggaaactacctactatcagtcctcactgaagtcccgcg |
| | | tgaccatcagcaaggataattccaaaaaccaagtgtctctgaagctctccagcgtcactgccgc |
| | | cgatactgccgtgtactactgcgccaagcactactattacggcggttcgtacgccatggactact |
| | | ggggccaagggacactcgtgaccgtgtcatcc |
| | 758 | EIVMTQSPATLSLSPGERATLSCRASQDISKYLNWYQQKPG |
| | | QAPRLLIYHTSRLHSGIPARFSGSGSGTDYTLTISSLQPEDFA |
| | | VYFCQQGNTLPYTFGQGTKLEIKGGGGSGGGGSGGGGSQV |
| | | QLQESGPGLVKPSETLSLTCTVSGVSLPDYGVSWIRQPPGKG |
| | | LEWIGVIWGSETTYYQSSLKSRVTISKDNSKNQVSLKLSSVT |
| | | AADTAVYYCAKHYYYGGSYAMDYWGQGTLVTVSS |
| scFv | 842 | caagtccagctgcaagaatccggtccgggacttgtgaagccgtccgaaaccctgtcactgactt |
| CAR19 in | | gcactgtgtccggggtgtcattgcccgactacggcgtgagctggattcggcagccccctggaa |
| c227 | | agggattggaatggatcggcgtgatctggggttcggaaactacctactatcagtcctcactgaa |
| | | gtcccgcgtgaccatcagcaaggataattccaaaaaccaagtgtctctgaagctctccagcgtc |
| | | actgccgccgatactgccgtgtactactgcgccaagcactactattacggcggttcgtacgccat |
| | | ggactactggggacaaggcactcttgtgactgtgtcaagcggcggtggagggagcggtggg |
| | | ggcggttcaggaggaggcggatcagagatcgtgatgacccaatccccagccaccctgtccct |
| | | cagccctggagaaagagccaccctgagctgccgggcctcccaggatatcagcaagtacttga |
| | | actggtaccaacaaaagccggggcaggcgccccggctcctgatctaccacacctcgcgcctc |
| | | cactcaggtatccccgccagattctcagggagcggctccggtactgactacaccctgactatttc |
| | | ctcactgcagccagaggactttgccgtgtacttctgccagcagggaaacactctgccgtacacc |
| | | ttcgggcagggaacgaagcttgaaattaag |
| | 843 | QVQLQESGPGLVKPSETLSLTCTVSGVSLPDYGVSWIRQPPG |
| | | KGLEWIGVIWGSETTYYQSSLKSRVTISKDNSKNQVSLKLSS |
| | | VTAADTAVYYCAKHYYYGGSYAMDYWGQGTLVTVSSGG |
| | | GGSGGGGSGGGGSEIVMTQSPATLSLSPGERATLSCRASQDI |
| | | SKYLNWYQQKPGQAPRLLIYHTSRLHSGIPARFSGSGSGTD |
| | | YTLTISSLQPEDFAVYFCQQGNTLPYTFGQGTKLEIK |
| scFv | 844 | gagattgtgatgactcagagcccggcgaccctgtccctgtcccccggggagagagcaaccct |
| CAR19 in | | gtcgtgccgggcctcccaagacatctcaaagtacctcaattggtatcagcagaagccaggaca |
| c230 | | ggctccacggttgctgatctaccacacttcgagactgcactcaggaatccccgcgcggttttcc |
| | | ggttccggctccgggaccgactacaccctgaccatcagctcgctccagcctgaggatttcgca |
| | | gtgtacttctgtcagcaaggaaacacccttccatacaccttcggacagggtaccaagctggaaa |
| | | tcaagggaggaggaggatctgggggcggtggttccggaggcggtggaagccaagtgcagc |
| | | tccaggaaagcggacccgggctggtcaagccgagcgaaaccctctcactgacttgtactgtgt |
| | | ccggagtgtccctgcctgactatggagtgtcctggatccgacagccccccggaaagggtctgg |
| | | agtggattggggtcatctggggctccgaaactacctactaccagagcagcctcaagagccgg |
| | | gtcaccatttcaaaggataactccaagaatcaagtgtccctgaagctgtcctcagtgacagccg |
| | | cagacaccgccgtgtactactgcgccaagcactactactacggaggctcctacgcaatggact |
| | | actggggacaaggcactttggtcactgtgtcaagc |
| | 758 | EIVMTQSPATLSLSPGERATLSCRASQDISKYLNWYQQKPG |
| | | QAPRLLIYHTSRLHSGIPARFSGSGSGTDYTLTISSLQPEDFA |
| | | VYFCQQGNTLPYTFGQGTKLEIKGGGGSGGGGSGGGGSQV |
| | | QLQESGPGLVKPSETLSLTCTVSGVSLPDYGVSWIRQPPGKG |
| | | LEWIGVIWGSETTYYQSSLKSRVTISKDNSKNQVSLKLSSVT |
| | | AADTAVYYCAKHYYYGGSYAMDYWGQGTLVTVSS |
| ScFVCAR2 | 845 | gaagtgcagctgcagcagtcagggcctggcctggtcaagccgtcgcagaccctctccctgac |
| 2 in c201 | | atgcgccattagcggggactccatgctgagcaactcggacacctggaactggattcggcagtc |
| and c203 | | cccttcccggggactcgagtggctcggacgcacctaccatcggagcacttggtacgacgacta |
| | | cgcctcctccgtgagaggtcgcgtgtcgatcaacgtggatacctcgaagaaccagtatagcttg |
| | | caactgaacgccgtgacccctgaggataccggagtgtactattgtgcgagagtcaggctgcaa |
| | | gacggaaactcctggtccgacgcatttgatgtctggggacagggtactatggtcacggtgtcat |
| | | ctggaggcggaggatcgcaaagcgccctgactcagccggcttcggctagcggttcaccggg |
| | | gcagtccgtgactatctcctgcaccgggacttcctccgacgtgggaggctacaattacgtgtcct |
| | | ggtaccagcaacaccccggcaaagccccaaagctgatgatctacgacgtcagcaacagacc |
| | | cagcggagtgtccaaccggttcagcggctccaagtccggcaacaccgcctccctgaccatca |
| | | gcgggcttcaggccgaagatgaggcggattactactgctcctcgtacacctcaagctcaactct |
| | | gtacgtgttcggcaccggtactcagctcaccgtgctg |
| | 846 | EVQLQQSGPGLVKPSQTLSLTCAISGDSMLSNSDTWNWIRQ |
| | | SPSRGLEWLGRTYHRSTWYDDYASSVRGRVSINVDTSKNQ |
| | | YSLQLNAVTPEDTGVYYCARVRLQDGNSWSDAFDVWGQG |
| | | TMVTVSSGGGGSQSALTQPASASGSPGQSVTISCTGTSSDVG |
| | | GYNYVSWYQQHPGKAPKLMIYDVSNRPSGVSNRFSGSKSG |
| | | NTASLTISGLQAEDEADYYCSSYTSSSTLYVFGTGTQLTVL |
| ScFVCAR2 | 847 | gaagtgcagctgcagcagtcaggaccgggcctggtcaaaccttcgcagactctgtccctgact |
| 2 in 230 | | tgcgctataagcggggactccatgctgagcaattcggacacttggaactggattcgccaaagc |
| | | cccagccggggtctggaatggctgggaaggacctaccatcgctctacttggtacgacgactac |
| | | gccagctccgtgcgaggacgcgtgtccatcaacgtggacacctccaagaaccagtactcgctt |
| | | caactcaacgcagtgacccctgaagataccggagtctactattgcgcccgcgtgcggctccag |
| | | gacgggaactcctggtcggacgctttcgatgtctggggacagggcactatggtcaccgtcagc |
| | | tccggcggcggcggtagccaatcggcgctgacacagccggcttccgcctcgggatcgcctg |
| | | gacagtcggtgaccatctcgtgcactggaacctcctccgacgtgggcggctacaattatgtgtc |
| | | atggtaccagcagcacccgggaaaggcccctaagctgatgatctacgacgtgtccaatagacc |
| | | tagcggggtgtcaaacagattctccggatccaaatccggaaacactgcctccctgaccatttcc |
| | | ggactgcaggccgaggacgaagccgattactactgctcctcttacacctcctcatccaccctcta |
| | | cgtgtttgggactgggacccagctgaccgtcctc |
| | 846 | EVQLQQSGPGLVKPSQTLSLTCAISGDSMLSNSDTWNWIRQ |
| | | SPSRGLEWLGRTYHRSTWYDDYASSVRGRVSINVDTSKNQ |
| | | YSLQLNAVTPEDTGVYYCARVRLQDGNSWSDAFDVWGQG |
| | | TMVTVSSGGGGSQSALTQPASASGSPGQSVTISCTGTSSDVG |
| | | GYNYVSWYQQHPGKAPKLMIYDVSNRPSGVSNRFSGSKSG |
| | | NTASLTISGLQAEDEADYYCSSYTSSSTLYVFGTGTQLTVL |
| ScFVCAR2 | 848 | gaagtgcagcttcaacaatcaggaccaggactcgtcaaaccatcacagaccctctccctcacat |
| 2 in 171, | | gtgccatctccggggactccatgttgagcaattccgacacttggaattggattagacaaagccc |
| c182 | | gtcccggggtctggaatggttgggacgcacctaccaccggtctacttggtacgacgactacgc |
| | | gtcatccgtgcggggaagagtgtccatcaacgtggacacctccaagaaccagtacagcctgc |
| | | agcttaatgccgtgactcctgaggatacgggcgtctactactgcgcccgcgtccgcctgcaag |
| | | acgggaacagctggagcgatgcattcgatgtctggggccagggaactatggtcaccgtgtcgt |
| | | ctgggggcggtggatcgggtggcgggggttcggggggcggcggctctcagtccgctcttac |
| | | ccaaccggcctcagcctcggggagccccggccagagcgtgaccatttcctgcaccggcactt |
| | | catccgacgtgggcggctacaactacgtgtcctggtaccaacagcacccgggaaaggccccc |
| | | aagctcatgatctacgacgtgtccaacaggccctcgggagtgtccaaccggttctcgggttcga |
| | | aatcgggaaacacagccagcctgaccatcagcggactgcaggctgaagatgaagccgacta |
| | | ctactgctcctcctacacctcgtcatccacgctctacgtgttcggcactggaactcagctgactgt |
| | | gctg |
| | 753 | EVQLQQSGPGLVKPSQTLSLTCAISGDSMLSNSDTWNWIRQ |
| | | SPSRGLEWLGRTYHRSTWYDDYASSVRGRVSINVDTSKNQ |
| | | YSLQLNAVTPEDTGVYYCARVRLQDGNSWSDAFDVWGQG |
| | | TMVTVSSGGGGSGGGGSGGGGSQSALTQPASASGSPGQSV |
| | | TISCTGTSSDVGGYNYVSWYQQHPGKAPKLMIYDVSNRPSG |
| | | VSNRFSGSKSGNTASLTISGLQAEDEADYYCSSYTSSSTLYV |
| | | FGTGTQLTVL |
| ScFVCAR2 | 849 | cagtccgctcttacccaaccggcctcagcctcggggagccccggccagagcgtgaccatttcc |
| 2 in c188 | | tgcaccggcacttcatccgacgtgggcggctacaactacgtgtcctggtaccaacagcacccg |
| | | ggaaaggcccccaagctcatgatctacgacgtgtccaacaggccctcgggagtgtccaaccg |
| | | gttctcgggttcgaaatcgggaaacacagccagcctgaccatcagcggactgcaggctgaag |
| | | atgaagccgactactactgctcctcctacacctcgtcatccacgctctacgtgttcggcactgga |
| | | actcagctgactgtgctgggcggaggaggctccgaagtgcagcttcaacaatcaggaccagg |
| | | actcgtcaaaccatcacagaccctctccctcacatgtgccatctccggggactccatgttgagca |
| | | attccgacacttggaattggattagacaaagcccgtcccggggtctggaatggttgggacgca |
| | | cctaccaccggtctacttggtacgacgactacgcgtcatccgtgcggggaagagtgtccatcaa |
| | | cgtggacacctccaagaaccagtacagcctgcagcttaatgccgtgactcctgaggatacggg |
| | | cgtctactactgcgcccgcgtccgcctgcaagacgggaacagctggagcgatgcattcgatgt |
| | | ctggggccagggaactatggtcaccgtgtcgtct |
| | 850 | QSALTQPASASGSPGQSVTISCTGTSSDVGGYNYVSWYQQH |
| | | PGKAPKLMIYDVSNRPSGVSNRFSGSKSGNTASLTISGLQAE |
| | | DEADYYCSSYTSSSTLYVFGTGTQLTVLGGGGSEVQLQQSG |
| | | PGLVKPSQTLSLTCAISGDSMLSNSDTWNWIRQSPSRGLEW |
| | | LGRTYHRSTWYDDYASSVRGRVSINVDTSKNQYSLQLNAV |
| | | TPEDTGVYYCARVRLQDGNSWSDAFDVWGQGTMVTVSS |
| ScFVCAR2 | 851 | cagtccgctctgactcagccggcctcagcttcggggtcccctggtcaaagcgtcactatttcctg |
| 2 in c224 | | taccggaacctcatcagacgtgggcggctacaattacgtgtcctggtaccaacagcaccccgg |
| | | aaaggctcctaagcttatgatctacgacgtgtccaaccggccgtcaggagtgtccaacagattct |
| | | ccggctccaagagcggaaacactgccagcttgaccattagcggcttgcaggccgaggacga |
| | | agccgactactactgctctagctacacatcctcgtctaccctctacgtgtttggaacggggaccc |
| | | agctgactgtgctcgggggtggaggatcagaggtgcaactccagcagtccggtcctggcctc |
| | | gtgaaaccgtcccaaaccctgtccctgacttgcgccatctcgggcgactccatgctgtccaattc |
| | | cgacacctggaactggattagacaatcgcctagccggggactcgaatggctgggccggacct |
| | | accaccggtccacgtggtatgacgactacgcaagctccgtccggggaagggtgtccattaacg |
| | | tcgatacctccaagaaccagtacagccttcagctgaacgctgtgacccccgaggataccggcg |
| | | tctactactgtgcaagagtgcgattgcaggatggaaactcgtggtcggacgcattcgatgtctg |
| | | gggacagggaactatggtgaccgtgtcctcg |
| | 850 | QSALTQPASASGSPGQSVTISCTGTSSDVGGYNYVSWYQQH |
| | | PGKAPKLMIYDVSNRPSGVSNRFSGSKSGNTASLTISGLQAE |
| | | DEADYYCSSYTSSSTLYVFGTGTQLTVLGGGGSEVQLQQSG |
| | | PGLVKPSQTLSLTCAISGDSMLSNSDTWNWIRQSPSRGLEW |
| | | LGRTYHRSTWYDDYASSVRGRVSINVDTSKNQYSLQLNAV |
| | | TPEDTGVYYCARVRLQDGNSWSDAFDVWGQGTMVTVSS |
| ScFVCAR2 | 852 | cagtccgctctgactcagccggcctcagcttcggggtcccctggtcaaagcgtcactatttcctg |
| 2 in c227 | | taccggaacctcatcagacgtgggcggctacaattacgtgtcctggtaccaacagcaccccgg |
| | | aaaggctcctaagcttatgatctacgacgtgtccaaccggccgtcaggagtgtccaacagattct |
| | | ccggctccaagagcggaaacactgccagcttgaccattagcggcttgcaggccgaggacga |
| | | agccgactactactgctctagctacacatcctcgtctaccctctacgtgtttggaacggggaccc |
| | | agctgactgtgctcgggggtggaggatcagaggtgcaactccagcagtccggtcctggcctc |
| | | gtgaaaccgtcccaaaccctgtccctgacttgcgccatctcgggcgactccatgctgtccaattc |
| | | cgacacctggaactggattagacaatcgcctagccggggactcgaatggctgggccggacct |
| | | accaccggtccacgtggtatgacgactacgcaagctccgtccggggaagggtgtccattaacg |
| | | tcgatacctccaagaaccagtacagccttcagctgaacgctgtgacccccgaggataccggcg |
| | | tctactactgtgcaagagtgcgattgcaggatggaaactcgtggtcggacgcattcgatgtctg |
| | | gggacagggaactatggtcactgtgtcctcc |
| | 850 | QSALTQPASASGSPGQSVTISCTGTSSDVGGYNYVSWYQQH |
| | | PGKAPKLMIYDVSNRPSGVSNRFSGSKSGNTASLTISGLQAE |
| | | DEADYYCSSYTSSSTLYVFGTGTQLTVLGGGGSEVQLQQSG |
| | | PGLVKPSQTLSLTCAISGDSMLSNSDTWNWIRQSPSRGLEW |
| | | LGRTYHRSTWYDDYASSVRGRVSINVDTSKNQYSLQLNAV |
| | | TPEDTGVYYCARVRLQDGNSWSDAFDVWGQGTMVTVSS |

[0512] Table 33 provides nucleotide and amino acid sequences for additional CAR components, e.g., signal peptide, linkers and P2A sites, that can be used in a CAR molecule, e.g., a dual CAR molecule described herein (for example, a dual CAR molecule comprising (i) a first CAR that binds to CD22 and (ii) a second CAR that binds to CD19).

TABLE 33
Additional CAR components

| | SEQ | |
|---|---|---|
| Identifier | ID NO | Sequence |
| Signal peptide for | 853 | atggccctccctgtcaccgccctgctgcttccgctggctcttctgctccacgccgctcggc |
| CAR22 in c201, | | cc |
| c203, and tandem | 2 | MALPVTALLLPLALLLHAARP |
| CARs c171, | | |
| c182, c188 | | |
| Signal peptide | 854 | atggccctgcccgtgactgcgctcctgcttccgttggccctgctcctgcatgccgccagac |
| in tandem CARs | | ct |
| c224, c227 | 2 | MALPVTALLLPLALLLHAARP |
| Signal peptide | 855 | atggccttaccagtgaccgccttgctcctgccgctggccttgctgctccacgccgccagg |
| CAR19 in c201 | | ccg |
| and c203 | 2 | MALPVTALLLPLALLLHAARP |
| Signal peptide | 856 | atggcacttcccgtcaccgccctgctgctcccactcgccctccttctgcacgccgcccgcc |
| CAR22 in c230 | | cc |
| | 2 | MALPVTALLLPLALLLHAARP |
| Signal peptide | 857 | atggccctgccagtgaccgcgctcctgctgcccctggctctgctgcttcacgcggcccgg |
| CAR19 in c230 | | cct |
| | 2 | MALPVTALLLPLALLLHAARP |
| CD8 hinge and | 858 | accactaccccagcaccgaggccacccaccccggctcctaccatcgcctcccagcctct |
| transmembrane | | gtccctgcgtccggaggcatgtagacccgcagctggtggggccgtgcatacccggggt |
| CAR22 in c201 | | cttgacttcgcctgcgatatctacatttgggcccctctggctggtacttgcggggtcctgctg |
| and c203, and in | | ctttcactcgtgatcactctttactgt |
| tandem CARs | 202 | TTTPAPRPPTPAPTIASQPLSLRPEACRPAAGGAVHTRGL |
| c171, c182, c188, | | DFACDIYIWAPLAGTCGVLLLSLVITLYC |
| c224, c227 | | |
| CD8 hinge and | 859 | actaccaccccggccccgcggccccctacaccggcaccgactattgccagccagcctct |
| transmembrane | | ctcgctgcggccggaggcctgccgcccagccgccggcggagccgtgcacacccgcg |
| CAR22 | | gtctggacttcgcgtgcgatatctacatctgggctccgctggccgggacttgtggcgtgct |
| In c230 | | gctgctgtctctggtcatcacactgtactgc |
| | 202 | TTTPAPRPPTPAPTIASQPLSLRPEACRPAAGGAVHTRGL |
| | | DFACDIYIWAPLAGTCGVLLLSLVITLYC |
| CD8 hinge and | 860 | accacgacgccagcgccgcgaccaccaacaccggcgcccaccatcgcgtcgcagccc |
| transmembrane | | ctgtccctgcgcccagaggcgtgccggccagcggcggggggcgcagtgcacacgag |
| CAR19 in c201 | | ggggctggacttcgcctgtgatatctacatctgggcgcccttggccgggacttgtggggtc |
| and c203 | | cttctcctgtcactggttatcaccctttactgc |
| | 202 | TTTPAPRPPTPAPTIASQPLSLRPEACRPAAGGAVHTRGL |
| | | DFACDIYIWAPLAGTCGVLLLSLVITLYC |
| CD8 hinge and | 861 | accaccacccctgcgcctcggcctcctaccccggctcccactatcgcgagccagccgct |
| transmembrane | | gagcctgcggcctgaggcttgccgaccggccgctggcggcgccgtgcatactcgggg |
| CAR19 | | cctcgactttgcctgtgacatctacatctgggcccccctggccggaacgtgcggagtgct |
| In c230 | | gctgctgtcgctggtcattaccctgtattgc |
| | 202 | TTTPAPRPPTPAPTIASQPLSLRPEACRPAAGGAVHTRGL |
| | | DFACDIYIWAPLAGTCGVLLLSLVITLYC |
| 4-1BB | 862 | aagcgcggtcggaagaagctgctgtacatctttaagcaacccttcatgaggcctgtgcag |
| CAR22 in c201 | | actactcaagaggaggacggctgttcatgccggttcccagaggaggaggaaggcggct |
| and c203, and | | gcgaactg |
| tandem CARs | 14 | KRGRKKLLYIFKQPFMRPVQTTQEEDGCSCRFPEEEEGG |
| c171, c182, c188, | | CEL |
| c224, c227 | | |
| 4-1BB | 15 | aaacggggcagaaagaaactcctgtatatattcaaacaaccatttatgagaccagtacaaa |
| CAR19 in c201 | | ctactcaagaggaagatggctgtagctgccgatttccagaagaagaagaaggaggatgt |
| and c203 | | gaactg |
| | 14 | KRGRKKLLYIFKQPFMRPVQTTQEEDGCSCRFPEEEEGG |
| | | CEL |
| 4-1BB | 863 | aagcgcggaagaaagaagctgctctacatcttcaagcaacccttcatgcggcctgtgcag |
| CAR22 in c230 | | accacccaggaagaggatggctgctcctgccggttcccggaggaagaagagggcgga |
| | | tgcgaactg |
| | 14 | KRGRKKLLYIFKQPFMRPVQTTQEEDGCSCRFPEEEEGG |
| | | CEL |
| 4-1BB | 864 | aaacgcggaaggaagaagctgttgtacattttcaagcagcccttcatgcgcccggtgcaa |
| CAR19 in c230 | | actactcaggaggaagatggctgttcctgtcggttccccgaagaggaagaaggcggctg |
| | | cgagttg |
| | 14 | KRGRKKLLYIFKQPFMRPVQTTQEEDGCSCRFPEEEEGG |
| | | CEL |
| CD3zeta | 865 | cgcgtgaaattcagccgcagcgcagatgctccagcctaccagcaggggcagaaccagc |
| CAR22 in c201 | | tctacaacgaactcaatcttggtcggagagaggagtacgacgtgctggacaagcggaga |
| and c203, and | | ggacgggacccagaaatgggcgggaagccgcgcagaaagaatccccaagagggcct |
| tandem CARs | | gtacaacgagctccaaaaggataagatggcagaagcctatagcgagattggtatgaaag |
| 171, c182, c188, | | gggaacgcagaagaggcaaaggccacgacggactgtaccagggactcagcaccgcc |
| c224, c227 | | accaaggacacctatgacgctcttcacatgcaggccctgccgcctcgg |
| | 20 | RVKFSRSADAPAYQQGQNQLYNELNLGRREEYDVLDKR |
| | | RGRDPEMGGKPRRKNPQEGLYNELQKDKMAEAYSEIG |
| | | [sequence omitted] |
| CD3zeta | 21 | agagtgaagttcagcaggagcgcagacgcccccgcgtaccagcagggccagaaccag |
| CAR19 in c201 | | ctctataacgagctcaatctaggacgaagagaggagtacgatgttttggacaagagacgt |
| and c203 | | ggccgggaccctgagatggggggaaagccgagaaggaagaaccctcaggaaggcct |
| | | gtacaatgaactgcagaaagataagatggcggaggcctacagtgagattgggatgaaag |
| | | gcgagcgccggaggggcaaggggcacgatggcctttaccagggtctcagtacagcca |
| | | ccaaggacacctacgacgcccttcacatgcaggccctgccccctcgc |
| | 20 | RVKFSRSADAPAYQQGQNQLYNELNLGRREEYDVLDKR |
| | | RGRDPEMGGKPRRKNPQEGLYNELQKDKMAEAYSEIG |
| | | [sequence omitted] |
| CD3zeta | 866 | cgcgtgaagttcagccgaagcgccgacgccccggcctaccagcagggccagaaccaa |
| CAR22 in c230 | | ctgtacaacgaactcaacctgggtcggagagaagagtacgacgtgctggacaaaagac |
| | | gcggcagggaccccgagatgggcggaaagcctcgccgcaagaacccgcaggaggg |
| | | cctctacaacgagctgcagaaggacaagatggccgaagcctactcagagatcggcatg |
| | | aagggggagcggaggcgcgggaagggccacgacggtttgtaccaaggactttccact |
| | | gcgaccaaggacacctacgatgccctccatatgcaagccctgccgccccgg |
| | 20 | RVKFSRSADAPAYQQGQNQLYNELNLGRREEYDVLDKR |
| | | RGRDPEMGGKPRRKNPQEGLYNELQKDKMAEAYSEIG |
| | | [sequence omitted] |
| CD3zeta | 867 | agggtcaagttctcccggtccgccgatgctcccgcctaccaacaggggcagaaccagct |
| CAR19 in c230 | | ttataacgaactgaacctgggcaggagggaggaatatgatgtgttggataagcgccggg |
| | | gccgggacccagaaatggggggaaagcccagaagaaagaaccctcaagagggacttt |
| | | acaacgaattgcagaaagacaaaatggccgaggcctactccgagattgggatgaaggg |
| | | cgaaagacggagaggaaaggggcacgacgggctctaccagggactcagcaccgcca |
| | | ccaaagatacctacgacgccctgcatatgcaggcgctgccgccgcgc |
| | 20 | RVKFSRSADAPAYQQGQNQLYNELNLGRREEYDVLDKR |
| | | RGRDPEMGGKPRRKNPQEGLYNELQKDKMAEAYSEIG |
| | | [sequence omitted] |
| Linker between | 868 | ttggcagaagccgccgcgaaa |
| scFVs in c171 | 869 | LAEAAAK |
| Linker between | 870 | ggtggaggtggcagcggaggaggtgggtccggcggtggaggaagc |
| scFVs in | | |
| c182, c188 | 104 | GGGGSGGGGSGGGGS |
| Linker between | 871 | ggcggaggcgggagcggaggaggaggctctggcggaggaggaagc |
| scFVs in c224 | 104 | GGGGSGGGGSGGGGS |
| Linker between | 872 | ggcggtggaggctcgggggggggcggctcaggaggaggcggctca |
| scFVs in c227 | 104 | GGGGSGGGGSGGGGS |
| P2A in c201, | 873 | ggaagcggagctactaacttcagcctgctgaagcaggctggagacgtggaggagaacc |
| c203 | | ctggacct |
| | 874 | GSGATNFSLLKQAGDVEENPGP |
| P2A in c230 | 875 | ggttccggagctaccaacttctcgctgttgaagcaggccggagatgtcgaggaaaaccc |
| | | gggacct |
| | 874 | GSGATNFSLLKQAGDVEENPGP |
| Gly4Ser linker | 876 | Ggtggaggtggcagc |
| | 877 | GGGGS |

[0513] In some embodiments, the CAR-expressing immune effector cell described herein can further comprise a second CAR, e.g., a second CAR that includes a different antigen binding domain, e.g., to the same target (e.g., a target described above) or a different target. In some embodiments, the second CAR includes an antigen binding domain to a target expressed on the same cancer cell type as the target of the first CAR. In some embodiments, the CAR-expressing immune effector cell comprises a first CAR that targets a first antigen and includes an intracellular signaling domain having a costimulatory signaling domain but not a primary signaling domain, and a second CAR that targets a second, different, antigen and includes an intracellular signaling domain having a primary signaling domain but not a costimulatory signaling domain. While not wishing to be bound by theory, placement of a costimulatory signaling domain, e.g., 4-1BB, CD28, CD27, or OX-40, onto the first CAR, and the primary signaling domain, e.g., CD3 zeta, on the second CAR can limit the CAR activity to cells where both targets are expressed. In some embodiments, the CAR expressing immune effector cell comprises a first CAR that includes an antigen binding domain that targets, e.g., a target described above, a transmembrane domain and a costimulatory domain and a second CAR that targets an antigen other than antigen targeted by the first CAR (e.g., an antigen expressed on the same cancer cell type as the first target) and includes an antigen binding domain, a transmembrane domain and a primary signaling domain. In another embodiment, the CAR expressing immune effector cell comprises a first CAR that includes an antigen binding domain that targets, e.g., a target described above, a transmembrane domain and a primary signaling domain and a second CAR that targets an antigen other than antigen targeted by the first CAR (e.g., an antigen expressed on the same cancer cell type as the first target) and includes an antigen binding domain to the antigen, a transmembrane domain and a costimulatory signaling domain.

[0514] In some embodiments, the CAR-expressing immune effector cell comprises a CAR described herein, e.g., a CAR to a target described above, and an inhibitory CAR. In some embodiments, the inhibitory CAR comprises an antigen binding domain that binds an antigen found on normal cells but not cancer cells, e.g., normal cells that also express the target. In some embodiments, the inhibitory CAR comprises the antigen binding domain, a transmembrane domain and an intracellular domain of an inhibitory molecule. For example, the intracellular domain of the inhibitory CAR can be an intracellular domain of PD1, PD-L1, CTLA-4, TIM-3, CEACAM (e.g., CEACAM-1, CEACAM-3 and/or CEACAM-5), LAG-3, VISTA, BTLA, TIGIT, LAIR1, CD160, 2B4, or TGFR beta.

[0515] In some embodiments, an immune effector cell (e.g., T cell, NK cell) comprises a first CAR comprising an antigen binding domain that binds to a tumor antigen as described herein, and a second CAR comprising a PD1 extracellular domain or a fragment thereof.

[0516] In some embodiments, the cell further comprises an inhibitory molecule as described above.

[0517] In some embodiments, the second CAR in the cell is an inhibitory CAR, wherein the inhibitory CAR comprises an antigen binding domain, a transmembrane domain, and an intracellular domain of an inhibitory molecule. The inhibitory molecule can be chosen from one or more of: PD1, PD-L1, CTLA-4, TIM-3, LAG-3, VISTA, BTLA, TIGIT, LAIR1, CD160, 2B4, TGFR beta, CEACAM-1, CEACAM-3, and CEACAM-5. In some embodiments, the second CAR molecule comprises the extracellular domain of PD1 or a fragment thereof.

[0518] In embodiments, the second CAR molecule in the cell further comprises an intracellular signaling domain comprising a primary signaling domain and/or an intracellular signaling domain.

[0519] In other embodiments, the intracellular signaling domain in the cell comprises a primary signaling domain comprising the functional domain of CD3 zeta and a costimulatory signaling domain comprising the functional domain of 4-1BB.

[0520] In some embodiments, the antigen binding domain of the first CAR molecule comprises a scFv and the antigen binding domain of the second CAR molecule does not comprise a scFv. For example, the antigen binding domain of the first CAR molecule comprises a scFv and the antigen binding domain of the second CAR molecule comprises a camelid VHH domain.

[0521] Conformation of CARs

[0522] In the embodiments contemplated herein, it is appreciated that the conformation of one or more CARs could be modulated by the vectors described herein above. Accordingly, these conformations are described below in relation to the CAR-expressing cell.

[0523] Split CAR

[0524] In some embodiments, the CAR-expressing cell uses a split CAR. The split CAR approach is described in more detail in publications WO2014/055442 and WO2014/055657. Briefly, a split CAR system comprises a cell expressing a first CAR having a first antigen binding domain and a costimulatory domain (e.g., 41B), and the cell also expresses a second CAR having a second antigen binding domain and an intracellular signaling domain (e.g., CD3 zeta). When the cell encounters the first antigen, the costimulatory domain is activated, and the cell proliferates. When the cell encounters the second antigen, the intracellular signaling domain is activated and cell-killing activity begins. Thus, the CAR-expressing cell is only fully activated in the presence of both antigens.

[0525] Multiple CAR

[0526] In some aspects, the CAR-expressing cell described herein can further comprise a second CAR, e.g., a second CAR that includes a different antigen binding domain, e.g., to the same target or a different target (e.g., a target other than a cancer associated antigen described herein or a different cancer associated antigen described herein). In some embodiments, the second CAR includes an antigen binding domain to a target expressed the same cancer cell type as the cancer associated antigen. In some embodiments, the CAR-expressing cell comprises a first CAR that targets a first antigen and includes an intracellular signaling domain having a costimulatory signaling domain but not a primary signaling domain, and a second CAR that targets a second, different, antigen and includes an intracellular signaling domain having a primary signaling domain but not a costimulatory signaling domain. While not wishing to be bound by theory, placement of a costimulatory signaling domain, e.g., 4-1BB, CD28, CD27 or OX-40, onto the first CAR, and the primary signaling domain, e.g., CD3 zeta, on the second CAR can limit the CAR activity to cells where both targets are expressed. In some embodiments, the CAR expressing cell comprises a first cancer associated antigen CAR that includes an antigen binding domain that binds a target antigen described herein, a transmembrane domain and a costimulatory domain and a second CAR that targets a different target antigen (e.g., an antigen expressed on that same cancer cell type as the first target antigen) and includes an antigen binding domain, a transmembrane domain and a primary signaling domain. In another embodiment, the CAR expressing cell comprises a first CAR that includes an antigen binding domain that binds a target antigen described herein, a transmembrane domain and a primary signaling domain and a second CAR that targets an antigen other than the first target antigen (e.g., an antigen expressed on the same cancer cell type as the first target antigen) and includes an antigen binding domain to the antigen, a transmembrane domain and a costimulatory signaling domain.

[0527] In some embodiments, the claimed invention comprises a first and second CAR, wherein the antigen binding domain of one of said first CAR said second CAR does not comprise a variable light domain and a variable heavy domain. In some embodiments, the antigen binding domain of one of said first CAR said second CAR is an scFv, and the other is not an scFv. In some embodiments, the antigen binding domain of one of said first CAR said second CAR comprises a single VH domain, e.g., a camelid, shark, or lamprey single VH domain, or a single VH domain derived from a human or mouse sequence. In some embodiments, the antigen binding domain of one of said first CAR said second CAR comprises a nanobody. In some embodiments, the antigen binding domain of one of said first CAR said second CAR comprises a camelid VHH domain.

[0528] Once the methods described herein are performed, various assays can be used to evaluate the activity of, for e.g., the ability to expand T cells following antigen stimulation, sustain T cell expansion in the absence of re-stimulation, and anti-cancer activities in appropriate in vitro and animal models. Assays to evaluate the effects of a CAR of the present invention are known to those of skill in the art and generally described below.

[0529] Western blot analysis of CAR expression in primary T cells can be used to detect the presence of monomers and dimers. See, e.g., Milone et al., Molecular Therapy 17(8): 1453-1464 (2009). Very briefly, T cells (1:1 mixture of CD4⁺ and CD8⁺ T cells) expressing the CARs are expanded in vitro for more than 10 days followed by lysis and SDS-PAGE under reducing conditions. CARs containing the full length TCR-ζ cytoplasmic domain and the endogenous TCR-ζ chain are detected by western blotting using an antibody to the TCR-ζ chain. The same T cell subsets are used for SDS-PAGE analysis under non-reducing conditions to permit evaluation of covalent dimer formation.

[0530] In vitro expansion of CAR⁺ T cells following antigen stimulation can be measured by flow cytometry.

[0531] Sustained CAR⁺ T cell expansion in the absence of re-stimulation can also be measured. See, e.g., Milone et al., Molecular Therapy 17(8): 1453-1464 (2009). Briefly, mean T cell volume (fl) is measured on day 8 of culture using a Coulter Multisizer III particle counter, a Nexcelom Cellometer Vision or Millipore Scepter, following stimulation with αCD3/αCD28 coated magnetic beads on day 0, and transduction with the indicated CAR on day 1.

[0532] Animal models can also be used to measure a CART activity. For example, xenograft model using human a cancer associated antigen described herein-specific CAR⁺ T cells to treat a primary human pre-B ALL in immunodeficient mice can be used. See, e.g., Milone et al., Molecular Therapy 17(8): 1453-1464 (2009).

[0533] Dose dependent CAR treatment response can be evaluated. See, e.g., Milone et al., Molecular Therapy 17(8): 1453-1464 (2009). For example, peripheral blood is obtained 35-70 days after establishing leukemia in mice injected on day 21 with CAR T cells, an equivalent number of mock-transduced T cells, or no T cells. Mice from each group are randomly bled for determination of peripheral blood a cancer associate antigen as described herein⁺ ALL blast counts and then killed on days 35 and 49. The remaining animals are evaluated on days 57 and 70.

[0534] Assessment of cell proliferation and cytokine production has been previously described, e.g., at Milone et al., Molecular Therapy 17(8): 1453-1464 (2009).

Cytotoxicity can be assessed by a standard 51Cr-release assay. See, e.g., Milone et al., Molecular Therapy 17(8): 1453-1464 (2009

[0535] Imaging technologies can be used to evaluate specific trafficking and proliferation of CARs in tumor-bearing animal models. Such assays have been described, for example, in Barrett et al., Human Gene Therapy 22:1575-1586 (2011).

[0536] Other assays, including those described in the Example section herein as well as those that are known in the art can also be used to evaluate the CARs described herein.

### Anti-CD28 Antibody Molecules

[0537] In some embodiments, the anti-CD28 antibody, e.g., an anti-CD28 antibody to be used in a multispecific binding molecule described herein, comprises at least one antigen-binding region, e.g., a variable region or an antigen-binding fragment thereof, from anti-CD28 (2) as described in Table 19. In some embodiments, the anti-CD28 antibody molecule comprises one or two variable regions from anti-CD28 (2), as described in Table 19. In some embodiments, the anti-CD28 antibody comprises a heavy chain variable region (VH) comprising a heavy chain complementarity determining region 1 (HCDR1), a HCDR2, and a HCDR3, and a light chain variable region (VL) comprising a light chain complementarity determining region 1 (LCDR1), a LCDR2, and a LCDR3, wherein the HCDR1, HCDR2, HCDR3, LCDR1, LCDR2, and LCDR3 comprise the amino acid sequences of SEQ ID NOs: 538, 539, 540, 530, 531, and 532, respectively; the HCDR1, HCDR2, HCDR3, LCDR1, LCDR2, and LCDR3 comprise the amino acid sequences of SEQ ID NOs: 541, 539, 540, 530, 531, and 532, respectively; the HCDR1, HCDR2, HCDR3, LCDR1, LCDR2, and LCDR3 comprise the amino acid sequences of SEQ ID NOs: 542, 543, 540, 533, 534, and 535, respectively; or the HCDR1, HCDR2, HCDR3, LCDR1, LCDR2, and LCDR3 comprise the amino acid sequences of SEQ ID NOs: 544, 545, 546, 536, 534, and 532, respectively.

[0538] In some embodiments, the anti-CD28 antibody molecule comprises a VH comprising the amino acid sequence of SEQ ID NO: 547 or 548, or a sequence having at least about 80%, 85%, 90%, 92%, 95%, 97%, 98%, or 99% sequence identity to SEQ ID NO: 547 or 548. In some embodiments, the anti-CD28 antibody comprises a VL comprising the amino acid sequence of SEQ ID NO: 537, or a sequence having at least about 80%, 85%, 90%, 92%, 95%, 97%, 98%, or 99% sequence identity thereto. In some embodiments, the anti-CD28 antibody comprises a VH and a VL comprising the amino acid sequences of SEQ ID NOs: 547 and 537, respectively, or a sequence having at least about 80%, 85%, 90%, 92%, 95%, 97%, 98%, or 99% sequence identity to any of the aforesaid sequences. In some embodiments, the anti-CD28 antibody comprises a VH and a VL comprising the amino acid sequences of SEQ ID NOs: 548 and 537, respectively, or a sequence having at least about 80%, 85%, 90%, 92%, 95%, 97%, 98%, or 99% sequence identity to any of the aforesaid sequences.

[0539] It is understood that an anti-CD28 antibody described herein can be used in the context of a multispecific binding molecule, e.g., with an additional binding domain, e.g., an anti-CD3 binding domain described herein. It is also understood that anti-CD28 antibody described herein can be used in other contexts, e.g., as a monospecific antibody.

[0540] Cell Activation Agents

[0541] In some embodiments, the cell activation agent is a T cell stimulating compound, an anti-idiotype antibody to a CAR antigen binding domain, and/or a tumor antigen. In some embodiments, the T-cell stimulating compound is IL-2, IL-15, anti-CD2 mAb, anti-CD3 mAb, anti-CD28 mAb, neo-antigen peptides, peptides from shared antigens such as TRP2, gp100, tumor cell lysate, CD19, CD20, CD22, ROR1, mesothelin, CD33/IL3Ra, c-Met, PSMA, Glycolipid F77, EGFRvIII, GD-2, NY-ESO-1 TCR, and/or MAGE A3 TCR. In some embodiments, the cell activation agent comprises a CD3/TCR complex and/or an agent that stimulates a costimulatory molecule and/or growth factor receptor, optionally, wherein the cell activation agent is a multispecific binding molecule comprising an agent that stimulates a CD3/TCR complex and an agent that stimulates a costimulatory molecule and/or growth factor receptor.

[0542] In some embodiments, the agent that stimulates a CD3/TCR complex is an agent that stimulates CD3. In some embodiments, the agent that stimulates CD3 comprises one or more of a CD3 or TCR antigen binding domain, such as but not limited to an anti-CD3 or anti-TCR antibody or an antibody fragment comprising one or more CDRs, heavy chain, and/or light chain thereof.

[0543] Anti-CD3 antibody sequences and methods of making such antibodies are known in the art. Non-limiting examples of anti-CD3 antibody sequences, along with the relevant CDR, heavy chain, and light chain sequences are provided in Table 19. In some embodiments, the anti-CD3 binding domain comprises a VH and a VL comprising the amino acid sequences of SEQ ID NOs: 437 and 427, respectively. In some embodiments, the anti-CD3 binding domain comprises a VH and a VL comprising the amino acid sequences of SEQ ID NOs: 456 and 445, respectively. In some embodiments, the anti-CD3 binding domain comprises a VH and a VL comprising the amino acid sequences of SEQ ID NOs: 457 and 446, respectively. In some embodiments, the anti-CD3 binding domain comprises a VH and a VL comprising the amino acid sequences of SEQ ID NOs: 475 and 467, respectively. In some embodiments, the anti-CD3 binding domain comprises a VH and a VL comprising the amino acid sequences of SEQ ID NOs: 476 and 468, respectively. In some embodiments, the anti-CD3 binding domain comprises a VH and a VL comprising the amino acid sequences of SEQ ID NOs: 494 and 484, respectively

[0544] Anti-TCR antibody sequences and methods of making such antibodies are known in the art. Non-limiting examples of anti-TCR antibody sequences, along with the relevant CDR, heavy chain, and light chain sequences are provided in Table 19.

[0545] In some embodiments, the agent that stimulates a costimulatory molecule and/or growth factor receptor is an agent that stimulates CD28, ICOS, CD27, CD25, 4-1BB, TL6RA, IL6RB, or CD2. In some embodiments, the agent that stimulates a costimulatory molecule and/or growth factor receptor comprises one or more of a CD28, ICOS, CD27, CD25, 4-1BB, IL6RB, and/or CD2 antigen binding domain, such as but not limited to an anti-CD28, anti-ICOS, anti-CD27, anti-CD25, anti-4-1BB, anti-TL6RA, anti-IL6RB, or anti-CD2 antibody or an antibody fragment comprising one or more CDRs, heavy chain, and/or light chain thereof.

[0546] Anti-CD28 antibody sequences and methods of making such antibodies are known in the art. Non-limiting examples of anti-CD28 antibody sequences, along with the relevant CDR, VH, VL, HC and LC sequences are provided in Table 19.

[0547] Anti-ICOS antibody sequences and methods of making such antibodies are known in the art. Non-limiting examples of anti-ICOS antibody sequences, along with the relevant CDR, VH, VL, and LC sequences are provided in Table 19.

[0548] Anti-CD27 antibody sequences and methods of making such antibodies are known in the art. Non-limiting examples of anti-CD27 antibody sequences, along with the relevant CDR, VH, and VL sequences are provided in Table 19.

[0549] Anti-CD25 antibody sequences and methods of making such antibodies are known in the art. Non-limiting examples of anti-CD25 antibody sequences, along with the relevant CDR, VH, VL, HC, and LC sequences are provided in Table 19.

[0550] Anti-4-1BB antibody sequences and methods of making such antibodies are known in the art. Non-limiting examples of anti-4-IBB antibody sequences, along with the relevant CDR, VH, and VL sequences are provided in Table 19.

[0551] Anti-IL6RA antibody sequences and methods of making such antibodies are known in the art. Non-limiting examples of IL6RA antibody sequences, along with the relevant CDR, VH, and VL sequences are provided in Table 19.

[0552] Anti-IL6RB antibody sequences and methods of making such antibodies are known in the art. Non-limiting examples of IL6RB antibody sequences, along with the relevant CDR, VH, and VL sequences are provided in Table 19.

[0553] Anti-CD2 antibody sequences and methods of making such antibodies are known in the art. Non-limiting examples of anti-CD2 antibody sequences, along with the relevant CDR, VH, VL, HC and LC sequences are provided in Table 19.

[0554] In some embodiments, an antibody molecule described herein comprises a CDR, VH, VL, HC, and/or LC disclosed in Table 19, or sequence having at least 70%, 75%, 80%, 85%, 90%, 95%, 96%, 97%, 98%, or 99% identity thereto.

TABLE 19
Exemplary antibody, CDR, heavy chain variable
region (VH), light chain variable region (VL),
heavy chain (HC), and light chain (LC),
sequences by target antigen

| SEQ ID NO | Description | Amino acid sequence |
|---|---|---|
| ANTI-CD3 (1) | | |
| SEQ ID NO: 420 | LCDR1 | SASSSVSYMN |
| (Combined) | | |
| SEQ ID NO: 421 | LCDR2 | DTSKLAS |
| (Combined) | | |
| SEQ ID NO: 422 | LCDR3 | QQWSSNPFT |
| (Combined) | | |
| SEQ ID NO: 420 | LCDR1 | SASSSVSYMN |
| (Kabat) | | |
| SEQ ID NO: 421 | LCDR2 | DTSKLAS |
| (Kabat) | | |
| SEQ ID NO: 422 | LCDR3 | QQWSSNPFT |
| (Kabat) | | |
| SEQ ID NO: 423 | LCDR1 | SSSVSY |
| (Chothia) | | |
| SEQ ID NO: 424 | LCDR2 | DTS |
| (Chothia) | | |
| SEQ ID NO: 425 | LCDR3 | WSSNPF |
| (Chothia) | | |
| SEQ ID NO: 426 | LCDR1 | SSVSY |
| (IMGT) | | |
| SEQ ID NO: 424 | LCDR2 | DTS |
| (IMGT) | | |
| SEQ ID NO: 422 | LCDR3 | QQWSSNPFT |
| (IMGT) | | |
| SEQ ID NO: 427 | VL | DIQMTQSPSSLSASVGDRVTITCSASSSVSYM |
| | | NWYQQTPGKAPKRWIYDTSKLASGVPSRFSG |
| | | SGSGTDYTFTISSLQPEDIATYYCQQWSSNPFT |
| | | FGQGTKLQIT |
| SEQ ID NO: 428 | HCDR1 | GYTFTRYTMH |
| (Combined) | | |
| SEQ ID NO: 429 | HCDR2 | YINPSRGYTNYNQKVKD |
| (Combined) | | |
| SEQ ID NO: 430 | HCDR3 | YYDDHYSLDY |
| (Combined) | | |
| SEQ ID NO: 431 | HCDR1 | RYTMH |
| (Kabat) | | |
| SEQ ID NO: 429 | HCDR2 | YINPSRGYTNYNQKVKD |
| (Kabat) | | |
| SEQ ID NO: 430 | HCDR3 | YYDDHYSLDY |
| (Kabat) | | |
| SEQ ID NO: 432 | HCDR1 | GYTFTRY |
| (Chothia) | | |
| SEQ ID NO: 433 | HCDR2 | NPSRGY |
| (Chothia) | | |
| SEQ ID NO: 430 | HCDR3 | YYDDHYSLDY |
| (Chothia) | | |
| SEQ ID NO: 434 | HCDR1 | GYTFTRYT |
| (IMGT) | | |
| SEQ ID NO: 435 | HCDR2 | INPSRGYT |
| (IMGT) | | |
| SEQ ID NO: 436 | HCDR3 | ARYYDDHYSLDY |
| (IMGT) | | |
| SEQ ID NO: 437 | VH | QVQLVQSGGGVVQPGRSLRLSCKASGYTFTR |
| | | YTMHWVRQAPGKGLEWIGYINPSRGYTNYN |
| | | QKVKDRFTISRDNSKNTAFLQMDSLRPEDTG |
| | | VYFCARYYDDHYSLDYWGQGTPVTVSS |
| ANTI-CD3 (2) | | |
| SEQ ID NO: 438 | LCDR1 | GSSTGAVTSGNYPN |
| (Combined) | | |
| SEQ ID NO: 439 | LCDR2 | GTKFLAP |
| (Combined) | | |
| SEQ ID NO: 440 | LCDR3 | VLWYSNRWV |
| (Combined) | | |
| SEQ ID NO: 438 | LCDR1 | GSSTGAVTSGNYPN |
| (Kabat) | | |
| SEQ ID NO: 439 | LCDR2 | GTKFLAP |
| (Kabat) | | |
| SEQ ID NO: 440 | LCDR3 | VLWYSNRWV |
| (Kabat) | | |
| SEQ ID NO: 441 | LCDR1 | STGAVTSGNY |
| (Chothia) | | |
| SEQ ID NO: 442 | LCDR2 | GTK |
| (Chothia) | | |
| SEQ ID NO: 443 | LCDR3 | WYSNRW |
| (Chothia) | | |
| SEQ ID NO: 444 | LCDR1 | TGAVTSGNY |
| (IMGT) | | |
| SEQ ID NO: 442 | LCDR2 | GTK |
| (IMGT) | | |
| SEQ ID NO: 440 | LCDR3 | VLWYSNRWV |
| (IMGT) | | |
| SEQ ID NO: 445 | VL | QTVVTQEPSLTVSPGGTVTLTCGSSTGAVTSG |
| | | NYPNWVQQKPGQAPRGLIGGTKFLAPGTPAR |
| | | FSGSLLGGKAALTLSGVQPEDEAEYYCVLWY |
| | | SNRWVFGGGTKLTVL |
| SEQ ID NO: 446 | VL | QTVVTQEPSLTVSPGGTVTLTCGSSTGAVTSG |
| | | NYPNWVQQKPGQAPRGLIGGTKFLAPGTPAR |
| | | FSGSLLGGKAALTLSGVQPEDEAEYYCVLWY |
| | | SNRWVFGCGTKLTVL |
| SEQ ID NO: 447 | HCDR1 | GFTFNKYAMN |
| (Combined) | | |
| SEQ ID NO: 448 | HCDR2 | RIRSKYNNYATYYADSVKD |
| (Combined) | | |
| SEQ ID NO: 449 | HCDR3 | HGNFGNSYISYWAY |
| (Combined) | | |
| SEQ ID NO: 450 | HCDR1 | KYAMN |
| (Kabat) | | |
| SEQ ID NO: 448 | HCDR2 | RIRSKYNNYATYYADSVKD |
| (Kabat) | | |
| SEQ ID NO: 449 | HCDR3 | HGNFGNSYISYWAY |
| (Kabat) | | |
| SEQ ID NO: 451 | HCDR1 | GFTFNKY |
| (Chothia) | | |
| SEQ ID NO: 452 | HCDR2 | RSKYNNYA |
| (Chothia) | | |
| SEQ ID NO: 449 | HCDR3 | HGNFGNSYISYWAY |
| (Chothia) | | |
| SEQ ID NO: 453 | HCDR1 | GFTFNKYA |
| (IMGT) | | |
| SEQ ID NO: 454 | HCDR2 | IRSKYNNYAT |
| (IMGT) | | |
| SEQ ID NO: 455 | HCDR3 | VRHGNFGNSYISYWAY |
| (IMGT) | | |
| SEQ ID NO: 456 | VH | EVQLVESGGGLVQPGGSLKLSCAASGFTFNK |
| | | YAMNWVRQAPGKGLEWVARIRSKYNNYAT |
| | | YYADSVKDRFTISRDDSKNTAYLQMNNLKTE |
| | | DTAVYYCVRHGNFGNSYISYWAYWGQGTLV |
| | | TVSS |
| SEQ ID NO: 457 | VH | EVQLVESGGGLVQPGGSLKLSCAASGFTFNK |
| | | YAMNWVRQAPGKCLEWVARIRSKYNNYAT |
| | | YYADSVKDRFTISRDDSKNTAYLQMNNLKTE |
| | | DTAVYYCVRHGNFGNSYISYWAYWGQGTLV |
| | | TVSS |
| ANTI-CD3 (3) | | |
| SEQ ID NO: 458 | LCDR1 | RSSTGAVTTSNYAN |
| (Combined) | | |
| SEQ ID NO: 459 | LCDR2 | GTNKRAP |
| (Combined) | | |
| SEQ ID NO: 460 | LCDR3 | ALWYSNLWV |
| (Combined) | | |
| SEQ ID NO: 458 | LCDR1 | RSSTGAVTTSNYAN |
| (Kabat) | | |
| SEQ ID NO: 459 | LCDR2 | GTNKRAP |
| (Kabat) | | |
| SEQ ID NO: 460 | LCDR3 | ALWYSNLWV |
| (Kabat) | | |
| SEQ ID NO: 461 | LCDR1 | STGAVTTSNY |
| (Chothia) | | |
| SEQ ID NO: 462 | LCDR2 | GTN |
| (Chothia) | | |
| SEQ ID NO: 463 | LCDR3 | WYSNLW |
| (Chothia) | | |
| SEQ ID NO: 464 | LCDR1 | TGAVTTSNY |
| (IMGT) | | |
| SEQ ID NO: 465 | LCDR2 | GGT |
| (IMGT) | | |
| SEQ ID NO: 466 | LCDR3 | ALWYSNL |
| (IMGT) | | |
| SEQ ID NO: 467 | VL | QAVVTQEPSLTVSPGGTVTLTCRSSTGAVTTS |
| | | NYANWVQQKPGQAPRGLIGGTNKRAPWTPA |
| | | RFSGSLLGDKAALTLSGAQPEDEAEYFCALW |
| | | YSNLWVFGGGTKLTVL |
| SEQ ID NO: 468 | VL | QAVVTQEPSLTVSPGGTVTLTCRSSTGAVTTS |
| | | NYANWVQQKPGQAPRGLIGGTNKRAPWTPA |
| | | RFSGSLLGDKAALTLSGAQPEDEAEYFCALW |
| | | YSNLWVFGCGTKLTVL |
| SEQ ID NO: 469 | HCDR1 | GFTFNTYAMN |
| (Combined) | | |
| SEQ ID NO: 448 | HCDR2 | RIRSKYNNYATYYADSVKD |
| (Combined) | | |
| SEQ ID NO: 470 | HCDR3 | HGNFGNSYVSWFAY |
| (Combined) | | |
| SEQ ID NO: 471 | HCDR1 | TYAMN |
| (Kabat) | | |
| SEQ ID NO: 448 | HCDR2 | RIRSKYNNYATYYADSVKD |
| (Kabat) | | |
| SEQ ID NO: 470 | HCDR3 | HGNFGNSYVSWFAY |
| (Kabat) | | |
| SEQ ID NO: 472 | HCDR1 | GFTFNTY |
| (Chothia) | | |
| SEQ ID NO: 452 | HCDR2 | RSKYNNYA |
| (Chothia) | | |
| SEQ ID NO: 470 | HCDR3 | HGNFGNSYVSWFAY |
| (Chothia) | | |
| SEQ ID NO: 473 | HCDR1 | GFTFNTYA |
| (IMGT) | | |
| SEQ ID NO: 454 | HCDR2 | IRSKYNNYAT |
| (IMGT) | | |
| SEQ ID NO: 474 | HCDR3 | VRHGNFGNSYVSWFAY |
| (IMGT) | | |
| SEQ ID NO: 475 | VH | EVQLVESGGGLVQPGGSLKLSCAASGFTFNT |
| | | YAMNWVRQASGKGLEWVGRIRSKYNNYAT |
| | | YYADSVKDRFTISRDDSKSTLYLQMNSLKTE |
| | | DTAVYYCVRHGNFGNSYVSWFAYWGQGTL |
| | | VTVSS |
| SEQ ID NO: 476 | VH | EVQLVESGGGLVQPGGSLKLSCAASGFTFNT |
| | | YAMNWVRQASGKCLEWVGRIRSKYNNYAT |
| | | YYADSVKDRFTISRDDSKSTLYLQMNSLKTE |
| | | DTAVYYCVRHGNFGNSYVSWFAYWGQGTL |
| | | VTVSS |
| ANTI-CD3 (4) | | |
| SEQ ID NO: 477 | LCDR1 | RSSQSLVRSEGTTYFN |
| (Combined) | | |
| SEQ ID NO: 478 | LCDR2 | RVSNRFS |
| (Combined) | | |
| SEQ ID NO: 479 | LCDR3 | LQSSHFPWT |
| (Combined) | | |
| SEQ ID NO: 477 | LCDR1 | RSSQSLVRSEGTTYFN |
| (Kabat) | | |
| SEQ ID NO: 478 | LCDR2 | RVSNRFS |
| (Kabat) | | |
| SEQ ID NO: 479 | LCDR3 | LQSSHFPWT |
| (Kabat) | | |
| SEQ ID NO: 480 | LCDR1 | SQSLVRSEGTTY |
| (Chothia) | | |
| SEQ ID NO: 481 | LCDR2 | RVS |
| (Chothia) | | |
| SEQ ID NO: 482 | LCDR3 | SSHFPW |
| (Chothia) | | |
| SEQ ID NO: 483 | LCDR1 | QSLVRSEGTTY |
| (IMGT) | | |
| SEQ ID NO: 481 | LCDR2 | RVS |
| (IMGT) | | |
| SEQ ID NO: 479 | LCDR3 | LQSSHFPWT |
| (IMGT) | | |
| SEQ ID NO: 484 | VL | DILVTQTPVSLPVSLGGHVSISCRSSQSLVRSE |
| | | GTTYFNWYLQKPGQSPQLLIYRVSNRFSGVP |
| | | DRFSGSGSGTDFTLKISRVEPEDLGVYYCLQS |
| | | SHFPWTFGGGTKLELK |
| SEQ ID NO: 485 | HCDR1 | GFTFSKQGMH |
| (Combined) | | |
| SEQ ID NO: 486 | HCDR2 | MIYYDSSKMYYADTVKG |
| (Combined) | | |
| SEQ ID NO: 487 | HCDR3 | FWWDLDFDH |
| (Combined) | | |
| SEQ ID NO: 488 | HCDR1 | KQGMH |
| (Kabat) | | |
| SEQ ID NO: 486 | HCDR2 | MIYYDSSKMYYADTVKG |
| (Kabat) | | |
| SEQ ID NO: 487 | HCDR3 | FWWDLDFDH |
| (Kabat) | | |
| SEQ ID NO: 489 | HCDR1 | GFTFSKQ |
| (Chothia) | | |
| SEQ ID NO: 490 | HCDR2 | YYDSSK |
| (Chothia) | | |
| SEQ ID NO: 487 | HCDR3 | FWWDLDFDH |
| (Chothia) | | |
| SEQ ID NO: 491 | HCDR1 | GFTFSKQG |
| (IMGT) | | |
| SEQ ID NO: 492 | HCDR2 | IYYDSSKM |
| (IMGT) | | |
| SEQ ID NO: 493 | HCDR3 | ASFWWDLDFDH |
| (IMGT) | | |
| SEQ ID NO: 494 | VH | EVKLVESGGDLVQPGDSLTLSCVASGFTFSKQ |
| | | GMHWIRQAPKKGLEWIAMIYYDSSKMYYAD |
| | | TVKGRFTISRDNSKNTLYLEMNSLRSEDTAM |
| | | YYCASFWWDLDFDHWGQGVMVTVSS |
| ANTI-TCR | | |
| SEQ ID NO: 495 | LCDR1 | SATSSVSYMH |
| (Combined) | | |
| SEQ ID NO: 421 | LCDR2 | DTSKLAS |
| (Combined) | | |
| SEQ ID NO: 496 | LCDR3 | QQWSSNPLT |
| (Combined) | | |
| SEQ ID NO: 495 | LCDR1 | SATSSVSYMH |
| (Kabat) | | |
| SEQ ID NO: 421 | LCDR2 | DTSKLAS |
| (Kabat) | | |
| SEQ ID NO: 496 | LCDR3 | QQWSSNPLT |
| (Kabat) | | |
| SEQ ID NO: 497 | LCDR1 | TSSVSY |
| (Chothia) | | |
| SEQ ID NO: 424 | LCDR2 | DTS |
| (Chothia) | | |
| SEQ ID NO: 498 | LCDR3 | WSSNPL |
| (Chothia) | | |
| SEQ ID NO: 426 | LCDR1 | SSVSY |
| (IMGT) | | |
| SEQ ID NO: 424 | LCDR2 | DTS |
| (IMGT) | | |
| SEQ ID NO: 496 | LCDR3 | QQWSSNPLT |
| (IMGT) | | |
| SEQ ID NO: 499 | VL | QIVLTQSPAIMSASPGEKVTMTCSATSSVSYM |
| | | HWYQQKSGTSPKRWIYDTSKLASGVPARFSG |
| | | SGSGTSYSLTISSMEAEDAATYYCQQWSSNPL |
| | | TFGAGTKLELK |
| SEQ ID NO: 500 | HCDR1 | GYKFTSYVMH |
| (Combined) | | |
| SEQ ID NO: 501 | HCDR2 | YINPYNDVTKYNEKFKG |
| (Combined) | | |
| SEQ ID NO: 502 | HCDR3 | GSYYDYDGFVY |
| (Combined) | | |
| SEQ ID NO: 503 | HCDR1 | SYVMH |
| (Kabat) | | |
| SEQ ID NO: 501 | HCDR2 | YINPYNDVTKYNEKFKG |
| (Kabat) | | |
| SEQ ID NO: 502 | HCDR3 | GSYYDYDGFVY |
| (Kabat) | | |
| SEQ ID NO: 504 | HCDR1 | GYKFTSY |
| (Chothia) | | |
| SEQ ID NO: 505 | HCDR2 | NPYNDV |
| (Chothia) | | |
| SEQ ID NO: 502 | HCDR3 | GSYYDYDGFVY |
| (Chothia) | | |
| SEQ ID NO: 506 | HCDR1 | GYKFTSYV |
| (IMGT) | | |
| SEQ ID NO: 507 | HCDR2 | INPYNDVT |
| (IMGT) | | |
| SEQ ID NO: 508 | HCDR3 | ARGSYYDYDGFVY |
| (IMGT) | | |
| SEQ ID NO: 509 | VH | EVQLQQSGPELVKPGASVKMSCKASGYKFTS |
| | | YVMHWVKQKPGQGLEWIGYINPYNDVTKYN |
| | | EKFKGKATLTSDKSSSTAYMELSSLTSEDSAV |
| | | HYCARGSYYDYDGFVYWGQGTLVTVSA |
| ANTI-CD28 (1) | | |
| SEQ ID NO: 510 | LCDR1 | HASQNIYVWLN |
| (Combined) | | |
| SEQ ID NO: 511 | LCDR2 | KASNLHT |
| (Combined) | | |
| SEQ ID NO: 512 | LCDR3 | QQGQTYPYT |
| (Combined) | | |
| SEQ ID NO: 510 | LCDR1 | HASQNIYVWLN |
| (Kabat) | | |
| SEQ ID NO: 511 | LCDR2 | KASNLHT |
| (Kabat) | | |
| SEQ ID NO: 512 | LCDR3 | QQGQTYPYT |
| (Kabat) | | |
| SEQ ID NO: 513 | LCDR1 | SQNIYVW |
| (Chothia) | | |
| SEQ ID NO: 514 | LCDR2 | KAS |
| (Chothia) | | |
| SEQ ID NO: 515 | LCDR3 | GQTYPY |
| (Chothia) | | |
| SEQ ID NO: 516 | LCDR1 | QNIYVW |
| (IMGT) | | |
| SEQ ID NO: 514 | LCDR2 | KAS |
| (IMGT) | | |
| SEQ ID NO: 512 | LCDR3 | QQGQTYPYT |
| (IMGT) | | |
| SEQ ID NO: 517 | VL | DIQMTQSPSSLSASVGDRVTITCHASQNIYVW |
| | | LNWYQQKPGKAPKLLIYKASNLHTGVPSRFS |
| | | GSGSGTDFTLTISSLQPEDFATYYCQQGQTYP |
| | | YTFGGGTKVEIK |
| SEQ ID NO: 518 | LC | DIQMTQSPSSLSASVGDRVTITCHASQNIYVW |
| | | LNWYQQKPGKAPKLLIYKASNLHTGVPSRFS |
| | | GSGSGTDFTLTISSLQPEDFATYYCQQGQTYP |
| | | YTFGGGTKVEIKRTVAAPSVFIFPPSDEQLKSG |
| | | TASVVCLLNNFYPREAKVQWKVDNALQSGN |
| | | SQESVTEQDSKDSTYSLSSTLTLSKADYEKHK |
| | | VYACEVTHQGLSSPVTKSFNRGEC |
| SEQ ID NO: 519 | HCDR1 | GYTFTSYYIH |
| (Combined) | | |
| SEQ ID NO: 520 | HCDR2 | CIYPGNVNTNYNEKFKD |
| (Combined) | | |
| SEQ ID NO: 521 | HCDR3 | SHYGLDWNFDV |
| (Combined) | | |
| SEQ ID NO: 522 | HCDR1 | SYYIH |
| (Kabat) | | |
| SEQ ID NO: 520 | HCDR2 | CIYPGNVNTNYNEKFKD |
| (Kabat) | | |
| SEQ ID NO: 521 | HCDR3 | SHYGLDWNFDV |
| (Kabat) | | |
| SEQ ID NO: 523 | HCDR1 | GYTFTSY |
| (Chothia) | | |
| SEQ ID NO: 524 | HCDR2 | YPGNVN |
| (Chothia) | | |
| SEQ ID NO: 521 | HCDR3 | SHYGLDWNFDV |
| (Chothia) | | |
| SEQ ID NO: 525 | HCDR1 | GYTFTSYY |
| (IMGT) | | |
| SEQ ID NO: 526 | HCDR2 | IYPGNVNT |
| (IMGT) | | |
| SEQ ID NO: 527 | HCDR3 | TRSHYGLDWNFDV |
| (IMGT) | | |
| SEQ ID NO: 528 | VH | QVQLVQSGAEVKKPGASVKVSCKASGYTFTS |
| | | YYIHWVRQAPGQGLEWIGCIYPGNVNTNYNE |
| | | KFKDRATLTVDTSISTAYMELSRLRSDDTAV |
| | | YFCTRSHYGLDWNFDVWGQGTTVTVSS |
| SEQ ID NO: 529 | HC | QVQLVQSGAEVKKPGASVKVSCKASGYTFTS |
| | | YYIHWVRQAPGQGLEWIGCIYPGNVNTNYNE |
| | | KFKDRATLTVDTSISTAYMELSRLRSDDTAV |
| | | YFCTRSHYGLDWNFDVWGQGTTVTVSSAST |
| | | KGPSVFPLAPSSKSTSGGTAALGCLVKDYFPE |
| | | PVTVSWNSGALTSGVHTFPAVLQSSGLYSLSS |
| | | VVTVPSSSLGTQTYICNVNHKPSNTKVDKRV |
| | | EPKSC |
| ANTI-CD28 (2) | | |
| SEQ ID NO: 530 | LCDR1 | SGSSSNIVSNYVN |
| (Combined) | | |
| SEQ ID NO: 531 | LCDR2 | DNNKRPS |
| (Combined) | | |
| SEQ ID NO: 532 | LCDR3 | QSYAIGSYSVV |
| (Combined) | | |
| SEQ ID NO: 530 | LCDR1 | SGSSSNIVSNYVN |
| (Kabat) | | |
| SEQ ID NO: 531 | LCDR2 | DNNKRPS |
| (Kabat) | | |
| SEQ ID NO: 532 | LCDR3 | QSYAIGSYSVV |
| (Kabat) | | |
| SEQ ID NO: 533 | LCDR1 | SSSNIVSNY |
| (Chothia) | | |
| SEQ ID NO: 534 | LCDR2 | DNN |
| (Chothia) | | |
| SEQ ID NO: 535 | LCDR3 | YAIGSYSV |
| (Chothia) | | |
| SEQ ID NO: 536 | LCDR1 | SSNIVSNY |
| (IMGT) | | |
| SEQ ID NO: 534 | LCDR2 | DNN |
| (IMGT) | | |
| SEQ ID NO: 532 | LCDR3 | QSYAIGSYSVV |
| (IMGT) | | |
| SEQ ID NO: 537 | VL | DIVLTQPPSVSGAPGQRVTISCSGSSSNIVSNY |
| | | VNWYQQLPGTAPKLLIYDNNKRPSGVPDRFS |
| | | GSKSGTSASLAITGLQSEDEADYYCQSYAIGS |
| | | YSVVFGGGTKLTVL |
| SEQ ID NO: 538 | HCDR1 | GFTFSTYGMS |
| (Combined) | | |
| SEQ ID NO: 539 | HCDR2 | SIFYTGSSTYYADSVKG |
| (Combined) | | |
| SEQ ID NO: 540 | HCDR3 | IGYAGDSKYAI |
| (Combined) | | |
| SEQ ID NO: 541 | HCDR1 | TYGMS |
| (Kabat) | | |
| SEQ ID NO: 539 | HCDR2 | SIFYTGSSTYYADSVKG |
| (Kabat) | | |
| SEQ ID NO: 540 | HCDR3 | IGYAGDSKYAI |
| (Kabat) | | |
| SEQ ID NO: 542 | HCDR1 | GFTFSTY |
| (Chothia) | | |
| SEQ ID NO: 543 | HCDR2 | FYTGSS |
| (Chothia) | | |
| SEQ ID NO: 540 | HCDR3 | IGYAGDSKYAI |
| (Chothia) | | |
| SEQ ID NO: 544 | HCDR1 | GFTFSTYG |
| (IMGT) | | |
| SEQ ID NO: 545 | HCDR2 | IFYTGSST |
| (IMGT) | | |
| SEQ ID NO: 546 | HCDR3 | ARIGYAGDSKYAI |
| (IMGT) | | |
| SEQ ID NO: 547 | VH | QVQLVESGGGLVQPGGSLRLSCAASGFTFST |
| | | YGMSWVRQAPGKGLEWVSSIFYTGSSTYYA |
| | | DSVKGRFTISRDNSKNTLYLQMNSLRAEDTA |
| | | VYYCARIGYAGDSKYAIWGQGTLVTVSS |
| SEQ ID NO: 548 | VH | EVQLVESGGGLVQPGGSLRLSCAASGFTFSTY |
| | | GMSWVRQAPGKGLEWVSSIFYTGSSTYYADS |
| | | VKGRFTISRDNSKNTLYLQMNSLRAEDTAVY |
| | | YCARIGYAGDSKYAIWGQGTLVTVSS |
| ANTI-ICOS | | |
| SEQ ID NO: 549 | LCDR1 | KSSQSLLSGSFNYLT |
| (Combined) | | |
| SEQ ID NO: 550 | LCDR2 | YASTRHT |
| (Combined) | | |
| SEQ ID NO: 551 | LCDR3 | HHHYNAPPT |
| (Combined) | | |
| SEQ ID NO: 549 | LCDR1 | KSSQSLLSGSFNYLT |
| (Kabat) | | |
| SEQ ID NO: 550 | LCDR2 | YASTRHT |
| (Kabat) | | |
| SEQ ID NO: 551 | LCDR3 | HHHYNAPPT |
| (Kabat) | | |
| SEQ ID NO: 552 | LCDR1 | SQSLLSGSFNY |
| (Chothia) | | |
| SEQ ID NO: 553 | LCDR2 | YAS |
| (Chothia) | | |
| SEQ ID NO: 554 | LCDR3 | HYNAPP |
| (Chothia) | | |
| SEQ ID NO: 555 | LCDR1 | QSLLSGSFNY |
| (IMGT) | | |
| SEQ ID NO: 553 | LCDR2 | YAS |
| (IMGT) | | |
| SEQ ID NO: 551 | LCDR3 | HHHYNAPPT |
| (IMGT) | | |
| SEQ ID NO: 556 | VL | DIVMTQSPDSLAVSLGERATINCKSSQSLLSGS |
| | | FNYLTWYQQKPGQPPKLLIFYASTRHTGVPD |
| | | RFSGSGSGTDFTLTISSLQAEDVAVYYCHHHY |
| | | NAPPTFGPGTKVDIK |
| SEQ ID NO: 557 | LC | DIVMTQSPDSLAVSLGERATINCKSSQSLLSGS |
| | | FNYLTWYQQKPGQPPKLLIFYASTRHTGVPD |
| | | RFSGSGSGTDFTLTISSLQAEDVAVYYCHHHY |
| | | NAPPTFGPGTKVDIKRTVAAPSVFIFPPSDEQL |
| | | KSGTASVVCLLNNFYPREAKVQWKVDNALQ |
| | | SGNSQESVTEQDSKDSTYSLSSTLTLSKADYE |
| | | KHKVYACEVTHQGLSSPVTKSFNRGEC |
| SEQ ID NO: 558 | HCDR1 | GFTFSDYWMD |
| (Combined) | | |
| SEQ ID NO: 559 | HCDR2 | NIDEDGSITEYSPFVKG |
| (Combined) | | |
| SEQ ID NO: 560 | HCDR3 | WGRFGFDS |
| (Combined) | | |
| SEQ ID NO: 561 | HCDR1 | DYWMD |
| (Kabat) | | |
| SEQ ID NO: 559 | HCDR2 | NIDEDGSITEYSPFVKG |
| (Kabat) | | |
| SEQ ID NO: 560 | HCDR3 | WGRFGFDS |
| (Kabat) | | |
| SEQ ID NO: 562 | HCDR1 | GFTFSDY |
| (Chothia) | | |
| SEQ ID NO: 563 | HCDR2 | DEDGSI |
| (Chothia) | | |
| SEQ ID NO: 560 | HCDR3 | WGRFGFDS |
| (Chothia) | | |
| SEQ ID NO: 564 | HCDR1 | GFTFSDYW |
| (IMGT) | | |
| SEQ ID NO: 565 | HCDR2 | IDEDGSIT |
| (IMGT) | | |
| SEQ ID NO: 566 | HCDR3 | TRWGRFGFDS |
| (IMGT) | | |
| SEQ ID NO: 567 | VH | EVQLVESGGGLVQPGGSLRLSCAASGFTFSD |
| | | YWMDWVRQAPGKGLVWVSNIDEDGSITEYS |
| | | PFVKGRFTISRDNAKNTLYLQMNSLRAEDTA |
| | | VYYCTRWGRFGFDSWGQGTLVTVSS |
| ANTI-CD27 | | |
| SEQ ID NO: 568 | LCDR1 | RASQGISRWLA |
| (Combined) | | |
| SEQ ID NO: 55 | LCDR2 | AASSLQS |
| (Combined) | | |
| SEQ ID NO: 569 | LCDR3 | QQYNTYPRT |
| (Combined) | | |
| SEQ ID NO: 568 | LCDR1 | RASQGISRWLA |
| (Kabat) | | |
| SEQ ID NO: 55 | LCDR2 | AASSLQS |
| (Kabat) | | |
| SEQ ID NO: 569 | LCDR3 | QQYNTYPRT |
| (Kabat) | | |
| SEQ ID NO: 570 | LCDR1 | SQGISRW |
| (Chothia) | | |
| SEQ ID NO: 58 | LCDR2 | AAS |
| (Chothia) | | |
| SEQ ID NO: 571 | LCDR3 | YNTYPR |
| (Chothia) | | |
| SEQ ID NO: 572 | LCDR1 | QGISRW |
| (IMGT) | | |
| SEQ ID NO: 58 | LCDR2 | AAS |
| (IMGT) | | |
| SEQ ID NO: 569 | LCDR3 | QQYNTYPRT |
| (IMGT) | | |
| SEQ ID NO: 573 | VL | DIQMTQSPSSLSASVGDRVTITCRASQGISRW |
| | | LAWYQQKPEKAPKSLIYAASSLQSGVPSRFSG |
| | | SGSGTDFTLTISSLQPEDFATYYCQQYNTYPR |
| | | TFGQGTKVEIK |
| SEQ ID NO: 574 | HCDR1 | GFTFSSYDMH |
| (Combined) | | |
| SEQ ID NO: 575 | HCDR2 | VIWYDGSNKYYADSVKG |
| (Combined) | | |
| SEQ ID NO: 576 | HCDR3 | GSGNWGFFDY |
| (Combined) | | |
| SEQ ID NO: 577 | HCDR1 | SYDMH |
| (Kabat) | | |
| SEQ ID NO: 575 | HCDR2 | VIWYDGSNKYYADSVKG |
| (Kabat) | | |
| SEQ ID NO: 576 | HCDR3 | GSGNWGFFDY |
| (Kabat) | | |
| SEQ ID NO: 47 | HCDR1 | GFTFSSY |
| (Chothia) | | |
| SEQ ID NO: 578 | HCDR2 | WYDGSN |
| (Chothia) | | |
| SEQ ID NO: 576 | HCDR3 | GSGNWGFFDY |
| (Chothia) | | |
| SEQ ID NO: 579 | HCDR1 | GFTFSSYD |
| (IMGT) | | |
| SEQ ID NO: 580 | HCDR2 | IWYDGSNK |
| (IMGT) | | |
| SEQ ID NO: 581 | HCDR3 | ARGSGNWGFFDY |
| (IMGT) | | |
| SEQ ID NO: 582 | VH | QVQLVESGGGVVQPGRSLRLSCAASGFTFSS |
| | | YDMHWVRQAPGGLEWVAVIWYDGSNKYYA |
| | | DSVKGRFTISRDNSKNTLYLQMNSLRAEDTA |
| | | VYYCARGSGNWGFFDYWGQGTLVTVSS |
| ANTI-CD25 (1) | | |
| SEQ ID NO: 583 | LCDR1 | SASSSRSYMQ |
| (Combined) | | |
| SEQ ID NO: 421 | LCDR2 | DTSKLAS |
| (Combined) | | |
| SEQ ID NO: 584 | LCDR3 | HQRSSYT |
| (Combined) | | |
| SEQ ID NO: 583 | LCDR1 | SASSSRSYMQ |
| (Kabat) | | |
| SEQ ID NO: 421 | LCDR2 | DTSKLAS |
| (Kabat) | | |
| SEQ ID NO: 584 | LCDR3 | HQRSSYT |
| (Kabat) | | |
| SEQ ID NO: 585 | LCDR1 | SSSRSY |
| (Chothia) | | |
| SEQ ID NO: 424 | LCDR2 | DTS |
| (Chothia) | | |
| SEQ ID NO: 586 | LCDR3 | RSSY |
| (Chothia) | | |
| SEQ ID NO: 587 | LCDR1 | SSRSY |
| (IMGT) | | |
| SEQ ID NO: 424 | LCDR2 | DTS |
| (IMGT) | | |
| SEQ ID NO: 584 | LCDR3 | HQRSSYT |
| (IMGT) | | |
| SEQ ID NO: 588 | VL | QIVSTQSPAIMSASPGEKVTMTCSASSSRSYM |
| | | QWYQQKPGTSPKRWIYDTSKLASGVPARFSG |
| | | SGSGTSYSLTISSMEAEDAATYYCHQRSSYTF |
| | | GGGTKLEIK |
| SEQ ID NO: 589 | HCDR1 | GYSFTRYWMH |
| (Combined) | | |
| SEQ ID NO: 590 | HCDR2 | AIYPGNSDTSYNQKFEG |
| (Combined) | | |
| SEQ ID NO: 591 | HCDR3 | DYGYYFDF |
| (Combined) | | |
| SEQ ID NO: 592 | HCDR1 | RYWMH |
| (Kabat) | | |
| SEQ ID NO: 590 | HCDR2 | AIYPGNSDTSYNQKFEG |
| (Kabat) | | |
| SEQ ID NO: 591 | HCDR3 | DYGYYFDF |
| (Kabat) | | |
| SEQ ID NO: 593 | HCDR1 | GYSFTRY |
| (Chothia) | | |
| SEQ ID NO: 594 | HCDR2 | YPGNSD |
| (Chothia) | | |
| SEQ ID NO: 591 | HCDR3 | DYGYYFDF |
| (Chothia) | | |
| SEQ ID NO: 595 | HCDR1 | GYSFTRYW |
| (IMGT) | | |
| SEQ ID NO: 596 | HCDR2 | IYPGNSDT |
| (IMGT) | | |
| SEQ ID NO: 597 | HCDR3 | SRDYGYYFDF |
| (IMGT) | | |
| SEQ ID NO: 598 | VH | EVQLQQSGTVLARPGASVKMSCKASGYSFTR |
| | | YWMHWIKQRPGQGLEWIGAIYPGNSDTSYN |
| | | QKFEGKAKLTAVTSASTAYMELSSLTHEDSA |
| | | VYYCSRDYGYYFDFWGQGTTLTVSS |
| ANTI-CD25 (2) | | |
| SEQ ID NO: 599 | LCDR1 | KASQSVDYDGDSYMN |
| (Combined) | | |
| SEQ ID NO: 600 | LCDR2 | AASNLES |
| (Combined) | | |
| SEQ ID NO: 601 | LCDR3 | QQSNEDPYT |
| (Combined) | | |
| SEQ ID NO: 599 | LCDR1 | KASQSVDYDGDSYMN |
| (Kabat) | | |
| SEQ ID NO: 600 | LCDR2 | AASNLES |
| (Kabat) | | |
| SEQ ID NO: 601 | LCDR3 | QQSNEDPYT |
| (Kabat) | | |
| SEQ ID NO: 602 | LCDR1 | SQSVDYDGDSY |
| (Chothia) | | |
| SEQ ID NO: 58 | LCDR2 | AAS |
| (Chothia) | | |
| SEQ ID NO: 603 | LCDR3 | SNEDPY |
| (Chothia) | | |
| SEQ ID NO: 604 | LCDR1 | QSVDYDGDSY |
| (IMGT) | | |
| SEQ ID NO: 58 | LCDR2 | AAS |
| (IMGT) | | |
| SEQ ID NO: 601 | LCDR3 | QQSNEDPYT |
| (IMGT) | | |
| SEQ ID NO: 605 | VL | DIVLTQSPLSLPVTLGQPASISCKASQSVDYDG |
| | | DSYMNWYQQRPGQSPRLLIYAASNLESGVPD |
| | | RFSGSGSGTDFTLKISRVEAEDVGVYYCQQSN |
| | | EDPYTFGGGTKVEIK |
| SEQ ID NO: 606 | LC | DIVLTQSPLSLPVTLGQPASISCKASQSVDYDG |
| | | DSYMNWYQQRPGQSPRLLIYAASNLESGVPD |
| | | RFSGSGSGTDFTLKISRVEAEDVGVYYCQQSN |
| | | EDPYTFGGGTKVEIKRTVAAPSVFIFPPSDEQL |
| | | KSGTASVVCLLNNFYPREAKVQWKVDNALQ |
| | | SGNSQESVTEQDSKDSTYSLSSTLTLSKADYE |
| | | KHKVYACEVTHQGLSSPVTKSFNRGEC |
| SEQ ID NO: 607 | HCDR1 | GYAFTNYLIE |
| (Combined) | | |
| SEQ ID NO: 608 | HCDR2 | VINPGSGGTNYNEKFKG |
| (Combined) | | |
| SEQ ID NO: 609 | HCDR3 | WRGDGYYAYFDV |
| (Combined) | | |
| SEQ ID NO: 610 | HCDR1 | NYLIE |
| (Kabat) | | |
| SEQ ID NO: 608 | HCDR2 | VINPGSGGTNYNEKFKG |
| (Kabat) | | |
| SEQ ID NO: 609 | HCDR3 | WRGDGYYAYFDV |
| (Kabat) | | |
| SEQ ID NO: 611 | HCDR1 | GYAFTNY |
| (Chothia) | | |
| SEQ ID NO: 612 | HCDR2 | NPGSGG |
| (Chothia) | | |
| SEQ ID NO: 609 | HCDR3 | WRGDGYYAYFDV |
| (Chothia) | | |
| SEQ ID NO: 613 | HCDR1 | GYAFTNYL |
| (IMGT) | | |
| SEQ ID NO: 614 | HCDR2 | INPGSGGT |
| (IMGT) | | |
| SEQ ID NO: 615 | HCDR3 | ARWRGDGYYAYFDV |
| (IMGT) | | |
| SEQ ID NO: 616 | VH | EVQLVQSGAEVKKPGESLKISCKGSGYAFTN |
| | | YLIEWVRQMPGKGLEWMGVINPGSGGTNYN |
| | | EKFKGQVTISADKSISTAYLQWSSLKASDTA |
| | | MYYCARWRGDGYYAYFDVWGQGTTVTVSS |
| SEQ ID NO: 617 | HC | EVQLVQSGAEVKKPGESLKISCKGSGYAFTN |
| | | YLIEWVRQMPGKGLEWMGVINPGSGGTNYN |
| | | EKFKGQVTISADKSISTAYLQWSSLKASDTA |
| | | MYYCARWRGDGYYAYFDVWGQGTTVTVSS |
| | | ASTKGPSVFPLAPSSKSTSGGTAALGCLVKDY |
| | | FPEPVTVSWNSGALTSGVHTFPAVLQSSGLYS |
| | | LSSVVTVPSSSLGTQTYICNVNHKPSNTKVDK |
| | | RVEPKSC |
| ANTI-4-1BB | | |
| SEQ ID NO: 618 | LCDR1 | RASQSVSSYLA |
| (Combined) | | |
| SEQ ID NO: 619 | LCDR2 | DASNRAT |
| (Combined) | | |
| SEQ ID NO: 620 | LCDR3 | QQRSNWPPALT |
| (Combined) | | |
| SEQ ID NO: 618 | LCDR1 | RASQSVSSYLA |
| (Kabat) | | |
| SEQ ID NO: 619 | LCDR2 | DASNRAT |
| (Kabat) | | |
| SEQ ID NO: 620 | LCDR3 | QQRSNWPPALT |
| (Kabat) | | |
| SEQ ID NO: 621 | LCDR1 | SQSVSSY |
| (Chothia) | | |
| SEQ ID NO: 622 | LCDR2 | DAS |
| (Chothia) | | |
| SEQ ID NO: 623 | LCDR3 | RSNWPPAL |
| (Chothia) | | |
| SEQ ID NO: 624 | LCDR1 | QSVSSY |
| (IMGT) | | |
| SEQ ID NO: 622 | LCDR2 | DAS |
| (IMGT) | | |
| SEQ ID NO: 620 | LCDR3 | QQRSNWPPALT |
| (IMGT) | | |
| SEQ ID NO: 625 | VL | EIVLTQSPATLSLSPGERATLSCRASQSVSSYL |
| | | AWYQQKPGQAPRLLIYDASNRATGIPARFSG |
| | | SGSGTDFTLTISSLEPEDFAVYYCQQRSNWPP |
| | | ALTFCGGTKVEIK |
| SEQ ID NO: 626 | HCDR1 | GGSFSGYYWS |
| (Combined) | | |
| SEQ ID NO: 627 | HCDR2 | EINHGGYVTYNPSLES |
| (Combined) | | |
| SEQ ID NO: 628 | HCDR3 | DYGPGNYDWYFDL |
| (Combined) | | |
| SEQ ID NO: 629 | HCDR1 | GYYWS |
| (Kabat) | | |
| SEQ ID NO: 627 | HCDR2 | EINHGGYVTYNPSLES |
| (Kabat) | | |
| SEQ ID NO: 628 | HCDR3 | DYGPGNYDWYFDL |
| (Kabat) | | |
| SEQ ID NO: 630 | HCDR1 | GGSFSGY |
| (Chothia) | | |
| SEQ ID NO: 631 | HCDR2 | NHGGY |
| (Chothia) | | |
| SEQ ID NO: 628 | HCDR3 | DYGPGNYDWYFDL |
| (Chothia) | | |
| SEQ ID NO: 632 | HCDR1 | GGSFSGYY |
| (IMGT) | | |
| SEQ ID NO: 633 | HCDR2 | INHGGYV |
| (IMGT) | | |
| SEQ ID NO: 634 | HCDR3 | ARDYGPGNYDWYFDL |
| (IMGT) | | |
| SEQ ID NO: 635 | VH | QVQLQQWGAGLLKPSETLSLTCAVYGGSFSG |
| | | YYWSWIRQSPEKGLEWIGEINHGGYVTYNPS |
| | | LESRVTISVDTSKNQFSLKLSSVTAADTAVYY |
| | | CARDYGPGNYDWYFDLWGRGTLVTVSS |
| ANTI-IL6RA | | |
| SEQ ID NO: 636 | LCDR1 | RASQDISSYLN |
| (Combined) | | |
| SEQ ID NO: 637 | LCDR2 | YTSRLHS |
| (Combined) | | |
| SEQ ID NO: 300 | LCDR3 | QQGNTLPYT |
| (Combined) | | |
| SEQ ID NO: 636 | LCDR1 | RASQDISSYLN |
| (Kabat) | | |
| SEQ ID NO: 637 | LCDR2 | YTSRLHS |
| (Kabat) | | |
| SEQ ID NO: 300 | LCDR3 | QQGNTLPYT |
| (Kabat) | | |
| SEQ ID NO: 638 | LCDR1 | SQDISSY |
| (Chothia) | | |
| SEQ ID NO: 639 | LCDR2 | YTS |
| (Chothia) | | |
| SEQ ID NO: 640 | LCDR3 | GNTLPY |
| (Chothia) | | |
| SEQ ID NO: 641 | LCDR1 | QDISSY |
| (IMGT) | | |
| SEQ ID NO: 639 | LCDR2 | YTS |
| (IMGT) | | |
| SEQ ID NO: 300 | LCDR3 | QQGNTLPYT |
| (IMGT) | | |
| SEQ ID NO: 642 | VL | DIQMTQSPSSLSASVGDRVTITCRASQDISSYL |
| | | NWYQQKPGKAPKLLIYYTSRLHSGVPSRFSG |
| | | SGSGTDFTFTISSLQPEDIATYYCQQGNTLPYT |
| | | FGQGTKVEIK |
| SEQ ID NO: 643 | HCDR1 | GYSITSDHAWS |
| (Combined) | | |
| SEQ ID NO: 644 | HCDR2 | YISYSGITTYNPSLKS |
| (Combined) | | |
| SEQ ID NO: 645 | HCDR3 | SLARTTAMDY |
| (Combined) | | |
| SEQ ID NO: 646 | HCDR1 | SDHAWS |
| (Kabat) | | |
| SEQ ID NO: 644 | HCDR2 | YISYSGITTYNPSLKS |
| (Kabat) | | |
| SEQ ID NO: 645 | HCDR3 | SLARTTAMDY |
| (Kabat) | | |
| SEQ ID NO: 647 | HCDR1 | GYSITSDH |
| (Chothia) | | |
| SEQ ID NO: 648 | HCDR2 | SYSGI |
| (Chothia) | | |
| SEQ ID NO: 645 | HCDR3 | SLARTTAMDY |
| (Chothia) | | |
| SEQ ID NO: 649 | HCDR1 | GYSITSDHA |
| (IMGT) | | |
| SEQ ID NO: 650 | HCDR2 | ISYSGIT |
| (IMGT) | | |
| SEQ ID NO: 651 | HCDR3 | ARSLARTTAMDY |
| (IMGT) | | |
| SEQ ID NO: 652 | VH | QVQLQESGPGLVRPSQTLSLTCTVSGYSITSD |
| | | HAWSWVRQPPGRGLEWIGYISYSGITTYNPSL |
| | | KSRVTMLRDTSKNQFSLRLSSVTAADTAVYY |
| | | CARSLARTTAMDYWGQGSLVTVSS |
| ANTI-IL6RB | | |
| SEQ ID NO: 54 | LCDR1 | RASQSISSYLN |
| (Combined) | | |
| SEQ ID NO: 55 | LCDR2 | AASSLQS |
| (Combined) | | |
| SEQ ID NO: 653 | LCDR3 | QQSYSTPPIT |
| (Combined) | | |
| SEQ ID NO: 54 | LCDR1 | RASQSISSYLN |
| (Kabat) | | |
| SEQ ID NO: 55 | LCDR2 | AASSLQS |
| (Kabat) | | |
| SEQ ID NO: 653 | LCDR3 | QQSYSTPPIT |
| (Kabat) | | |
| SEQ ID NO: 57 | LCDR1 | SQSISSY |
| (Chothia) | | |
| SEQ ID NO: 58 | LCDR2 | AAS |
| (Chothia) | | |
| SEQ ID NO: 654 | LCDR3 | SYSTPPI |
| (Chothia) | | |
| SEQ ID NO: 60 | LCDR1 | QSISSY |
| (IMGT) | | |
| SEQ ID NO: 58 | LCDR2 | AAS |
| (IMGT) | | |
| SEQ ID NO: 653 | LCDR3 | QQSYSTPPIT |
| (IMGT) | | |
| SEQ ID NO: 655 | VL | DIQMTQSPSSLSASVGDRVTITCRASQSISSYL |
| | | NWYQQKPGKAPKLLIYAASSLQSGVPSRFSG |
| | | SGSGTDFTLTISSLQPEDFATYYCQQSYSTPPI |
| | | TFGQGTRLEIK |
| SEQ ID NO: 656 | HCDR1 | GFTFSDYYMT |
| (Combined) | | |
| SEQ ID NO: 657 | HCDR2 | YISSSGTNKYNADSVKG |
| (Combined) | | |
| SEQ ID NO: 658 | HCDR3 | DPPWGMDV |
| (Combined) | | |
| SEQ ID NO: 659 | HCDR1 | DYYMT |
| (Kabat) | | |
| SEQ ID NO: 657 | HCDR2 | YISSSGTNKYNADSVKG |
| (Kabat) | | |
| SEQ ID NO: 658 | HCDR3 | DPPWGMDV |
| (Kabat) | | |
| SEQ ID NO: 562 | HCDR1 | GFTFSDY |
| (Chothia) | | |
| SEQ ID NO: 660 | HCDR2 | SSSGTN |
| (Chothia) | | |
| SEQ ID NO: 658 | HCDR3 | DPPWGMDV |
| (Chothia) | | |
| SEQ ID NO: 661 | HCDR1 | GFTFSDYY |
| (IMGT) | | |
| SEQ ID NO: 662 | HCDR2 | ISSSGTNK |
| (IMGT) | | |
| SEQ ID NO: 663 | HCDR3 | VRDPPWGMDV |
| (IMGT) | | |
| SEQ ID NO: 664 | VH | QVQLVESGGGLVKPGGSLRLSCAASGFTFSD |
| | | YYMTWIRQTPGKGLDWVSYISSSGTNKYNA |
| | | DSVKGRFTISRDNAKNSLYLQMNSLRAEDTA |
| | | VYYCVRDPPWGMDVWGQGTTVTVSS |
| ANTI-CD2 (1) | | |
| SEQ ID NO: 665 | LCDR1 | RSSQSLLHSSGNTYLN |
| (Combined) | | |
| SEQ ID NO: 666 | LCDR2 | LVSKLES |
| (Combined) | | |
| SEQ ID NO: 667 | LCDR3 | MQFTHYPYT |
| (Combined) | | |
| SEQ ID NO: 665 | LCDR1 | RSSQSLLHSSGNTYLN |
| (Kabat) | | |
| SEQ ID NO: 666 | LCDR2 | LVSKLES |
| (Kabat) | | |
| SEQ ID NO: 667 | LCDR3 | MQFTHYPYT |
| (Kabat) | | |
| SEQ ID NO: 668 | LCDR1 | SQSLLHSSGNTY |
| (Chothia) | | |
| SEQ ID NO: 669 | LCDR2 | LVS |
| (Chothia) | | |
| SEQ ID NO: 670 | LCDR3 | FTHYPY |
| (Chothia) | | |
| SEQ ID NO: 671 | LCDR1 | QSLLHSSGNTY |
| (IMGT) | | |
| SEQ ID NO: 669 | LCDR2 | LVS |
| (IMGT) | | |
| SEQ ID NO: 667 | LCDR3 | MQFTHYPYT |
| (IMGT) | | |
| SEQ ID NO: 672 | VL | DVVMTQSPPSLLVTLGQPASISCRSSQSLLHSS |
| | | GNTYLNWLLQRPGQSPQPLIYLVSKLESGVPD |
| | | RFSGSGSGTDFTLKISGVEAEDVGVYYCMQF |
| | | THYPYTFGQGTKLEIK |
| SEQ ID NO: 673 | LC | DVVMTQSPPSLLVTLGQPASISCRSSQSLLHSS |
| | | GNTYLNWLLQRPGQSPQPLIYLVSKLESGVPD |
| | | RFSGSGSGTDFTLKISGVEAEDVGVYYCMQF |
| | | THYPYTFGQGTKLEIKRTVAAPSVFIFPPSDEQ |
| | | LKSGTASVVCLLNNFYPREAKVQWKVDNAL |
| | | QSGNSQESVTEQDSKDSTYSLSSTLTLSKADY |
| | | EKHKVYACEVTHQGLSSPVTKSFNRGEC |
| SEQ ID NO: 674 | HCDR1 | GYIFTEYYMY |
| (Combined) | | |
| SEQ ID NO: 675 | HCDR2 | RIDPEDGSIDYVEKFKK |
| (Combined) | | |
| SEQ ID NO: 676 | HCDR3 | GKFNYRFAY |
| (Combined) | | |
| SEQ ID NO: 677 | HCDR1 | EYYMY |
| (Kabat) | | |
| SEQ ID NO: 675 | HCDR2 | RIDPEDGSIDYVEKFKK |
| (Kabat) | | |
| SEQ ID NO: 676 | HCDR3 | GKFNYRFAY |
| (Kabat) | | |
| SEQ ID NO: 678 | HCDR1 | GYIFTEY |
| (Chothia) | | |
| SEQ ID NO: 679 | HCDR2 | DPEDGS |
| (Chothia) | | |
| SEQ ID NO: 676 | HCDR3 | GKFNYRFAY |
| (Chothia) | | |
| SEQ ID NO: 680 | HCDR1 | GYIFTEYY |
| (IMGT) | | |
| SEQ ID NO: 681 | HCDR2 | IDPEDGSI |
| (IMGT) | | |
| SEQ ID NO: 682 | HCDR3 | ARGKFNYRFAY |
| (IMGT) | | |
| SEQ ID NO: 683 | VH | QVQLVQSGAEVQRPGASVKVSCKASGYIFTE |
| | | YYMYWVRQAPGQGLELVGRIDPEDGSIDYVE |
| | | KFKKKVTLTADTSSSTAYMELSSLTSDDTAV |
| | | YYCARGKFNYRFAYWGQGTLVTVSS |
| SEQ ID NO: 684 | HC | QVQLVQSGAEVQRPGASVKVSCKASGYIFTE |
| | | YYMYWVRQAPGQGLELVGRIDPEDGSIDYVE |
| | | KFKKKVTLTADTSSSTAYMELSSLTSDDTAV |
| | | YYCARGKFNYRFAYWGQGTLVTVSSASTKG |
| | | PSVFPLAPSSKSTSGGTAALGCLVKDYFPEPV |
| | | TVSWNSGALTSGVHTFPAVLQSSGLYSLSSV |
| | | VTVPSSSLGTQTYICNVNHKPSNTKVDKKVEP |
| | | KSC |

[0555] In some embodiments, the agent that stimulates a CD3/TCR complex and the agent that stimulates a costimulatory molecule and/or growth factor receptor are comprised in a multispecific binding molecule. Thus, contemplated herein are multispecific binding molecules comprising an agent that stimulates a CD3/TCR complex and an agent that stimulates a costimulatory molecule and/or growth factor receptor, such as but not limited to a multispecific binding molecule comprising a CD3 antigen binding domain and one or more of a CD28, ICOS, CD27, CD25, 4-1BB, IL6RA, IL6RB, and/or CD2 antigen binding domain. Non-limiting examples of such binding domains, as noted above, are provided above, for example in Table 19 and the publications incorporated by reference herein.

[0556] In some embodiments, the multispecific binding molecule comprises a CD3 antigen binding domain and a CD28 or CD2 antigen binding domain. In some embodiments, the CD3 antigen binding domain is an anti-CD3 antibody, optionally the anti-CD3 (1), anti-CD3 (2), anti-CD3 (3), or anti-CD3 (4) provided in Table 19, or an antibody fragment comprising one or more CDRs, VH, and/or VL thereof In some embodiments, the CD28 antigen binding domain is an anti-CD28 antibody, optionally the anti-CD28 (1) or anti-CD28 (2) provided in Table 19, or an antibody fragment comprising one or more CDRs, VH heavy chain, VL, and/or light chain thereof In some embodiments, the CD2 antigen binding domain is an anti-CD2 antibody, optionally the anti-CD2 (1) provided in Table 19, or an antibody fragment comprising one or more CDRs, VH, heavy chain, VL, and/or light chain thereof.

[0557] In some embodiments, the multispecific binding molecules comprise one or more heavy and/or light chains. Non-limiting exemplary heavy and light chain sequences that may be comprised in these multispecific binding molecules are provided in Table 20 below. Non-limiting exemplary combinations thereof are suggested in Table 20 based on the categorization of the recited heavy and/or light chains as within a Construct. This Construct organization provides examples of configurations of heavy and/or light chains but that further combinations and permutations thereof are also possible. Non-limiting examples of the format of any of these Constructs is provided in FIG. 37A-B, 48A-B, 49A-B, and 50A-B.

[0558] In some embodiments, the multispecific binding molecule comprises one or more heavy and/or light chain sequences disclosed in Table 20, or a sequence having at least 70%, 75%, 80%, 85%, 90%, 95%, or 99% identity thereto.

TABLE 20
Exemplary Fc, heavy chain (HC), and light chain (LC) sequences

| SEQ ID | | |
|---|---|---|
| NO: | Chain | Amino acid sequence |
| 701 | Wild type Fc | DKTHTCPPCPAPELLGGPSVFLFPPKPKDTLMISRTPEVT |
| | | CVVVDVSHEDPEVKFNWYVDGVEVHNAKTKPREEQYN |
| | | STYRVVSVLTVLHQDWLNGKEYKCKVSNKALPAPIEKTI |
| | | SKAKGQPREPQVYTLPPSREEMTKNQVSLTCLVKGFYPS |
| | | DIAVEWESNGQPENNYKTTPPVLDSDGSFFLYSKLTVDK |
| | | SRWQQGNVFSCSVMHEALHNHYTQKSLSLSPGK |
| 702 | Fc DANAPA | DKTHTCPPCPAPELLGGPSVFLFPPKPKDTLMISRTPEVT |
| | | CVVVAVSHEDPEVKFNWYVDGVEVHNAKTKPREEQYA |
| | | STYRVVSVLTVLHQDWLNGKEYKCKVSNKALAAPIEKT |
| | | ISKAKGQPREPQVYTLPPSREEMTKNQVSLTCLVKGFYP |
| | | SDIAVEWESNGQPENNYKTTPPVLDSDGSFFLYSKLTVD |
| | | KSRWQQGNVFSCSVMHEALHNHYTQKSLSLSPGK |
| 879 | Human IgG1 | apeaaggpsvflfppkpkdtlmisrtpevtcvvvdvshedpevkfnwyvdgvevhn |
| | Fc variant | aktkpreeqynstyrvvsvltvlhqdwlngkeykckvsnkalaapiektiskakgq |
| | L234A/L235A/ | prepqvytlppsrdeltknqvsltclvkgfypsdiavewesngqpennykttppvl |
| | P329A | dsdgsfflyskltvdksrwqqgnvfscsvmhealhnhytqkslslspgk |
| | (LALAPA) | |
| 880 | Human IgG1 | apeaagapsvflfppkpkdtlmisrtpevtcvvvdvshedpevkfnwyvdgvevhn |
| | Fc variant | aktkpreeqynstyrvvsvltvlhqdwlngkeykckvsnkalpapiektiskakgq |
| | L234A/L235A/ | prepqvytlppsrdeltknqvsltclvkgfypsdiavewesngqpennykttppvl |
| | G237A | dsdgsfflyskltvdksrwqqgnvfscsvmhealhnhytqkslslspgk |
| | (LALAGA) | |
| 881 | Human IgG1 | apeaaggpsvflfppkpkdtlmisrtpevtcvvvdvshedpevkfnwyvdgvevhn |
| | Fc variant | aktkpreeqynstyrvvsvltvlhqdwlngkeykckvsnkalgapiektiskakgq |
| | L234A/L235A/ | prepqvytlppsrdeltknqvsltclvkgfypsdiavewesngqpennykttppvl |
| | P329G | dsdgsfflyskltvdksrwqqgnvfscsvmhealhnhytqkslslspgk |
| | (LALAPG) | |
| 882 | Fc LALAPG | DKTHTCPPCPAPEAAGGPSVFLFPPKPKDTLMISRTPEVT |
| | (L234A/ | CVVVDVSHEDPEVKFNWYVDGVEVHNAKTKPREEQYN |
| | L235A/P329G) | STYRVVSVLTVLHQDWLNGKEYKCKVSNKALGAPIEKT |
| | | ISKAKGQPREPQVYTLPPSRREEMKNQVSLTCLVKGFYP |
| | | SDIAVEWESNGQPENNYKTTPPVLDSDGSFFLYSKLTVD |
| | | KSRWQQGNVFSCSVMHEALHNHYTQKSLSLSPGK |
| 883 | Human IgG1 | apellggpsvflfppkpkdtlmisrtpevtcvvvavshedpevkfnwyvdgvevhn |
| | Fc variant | aktkpreeqynstyrvvsvltvlhqdwlngkeykckvsnkalaapiektiskakgq |
| | D265A/P329A | prepqvytlppsrdeltknqvsltclvkgfypsdiavewesngqpennykttppvl |
| | (DAPA) | dsdgsfflyskltvdksrwqqgnvfscsvmhealhnhytqkslslspgk |
| 884 | Fc DAPA | DKTHTCPPCPAPELLGGPSVFLFPPKPKDTLMISRTPEVT |
| | (D265A/ | CVVVAVSHEDPEVKFNWYVDGVEVHNAKTKPREEQYN |
| | P329A) | STYRVVSVLTVLHQDWLNGKEYKCKVSNKALAAPIEKT |
| | | ISKAKGQPREPQVYTLPPSREEMTKNQVSLTCLVKGFYP |
| | | SDIAVEWESNGQPENNYKTTPPVLDSDGSFFLYSKLTVD |
| | | KSRWQQGNVFSCSVMHEALHNHYTQKSLSLSPGK |
| 885 | Human IgG1 | apeaaggpsvflfppkpkdtlmisrtpevtcvvvdvkhedpevkfnwyvdgvevhn |
| | Fc variant | aktkpreeqynstyrvvsvltvlhqdwlngkeykckvsnkalaapiektiskakgq |
| | L234A/L235A/ | prepqvytlppsrdeltknqvsltclvkgfypsdiavewesngqpennykttppvl |
| | S267K/P329A | dsdgsfflyskltvdksrwqqgnvfscsvmhealhnhytqkslslspgk |
| | (LALASKPA) | |
| 886 | Fc | DKTHTCPPCPAPEAAGGPSVFLFPPKPKDTLMISRTPEVT |
| | LALASKPA | CVVVDVKHEDPEVKFNWYVDGVEVHNAKTKPREEQYN |
| | (L234A/ | STYRVVSVLTVLHQDWLNGKEYKCKVSNKALAAPIEKT |
| | L235A/S267K/ | ISKAKGQPREPQVYTLPPSREEMTKNQVSLTCLVKGFYP |
| | P329A) | SDIAVEWESNGQPENNYKTTPPVLDSDGSFFLYSKLTVD |
| | | KSRWQQGNVFSCSVMHEALHNHYTQKSLSLSPGK |
| 887 | Human IgG1 | apellggpsvflfppkpkdtlmisrtpevtcvvvavkhedpevkfnwyvdgvevhn |
| | Fc variant | aktkpreeqynstyrvvsvltvlhqdwlngkeykckvsnkalaapiektiskakgq |
| | D265A/P329A/ | prepqvytlppsrdeltknqvsltclvkgfypsdiavewesngqpennykttppvl |
| | S267K | dsdgsfflyskltvdksrwqqgnvfscsvmhealhnhytqkslslspgk |
| | (DAPASK) | |
| 888 | Human IgG1 | apellgapsvflfppkpkdtlmisrtpevtcvvvavshedpevkfnwyvdgvevhn |
| | Fc variant | aktkpreegynstyrvvsvltvlhqdwlngkeykckvsnkalaapiektiskakgq |
| | G237A/D265A/ | prepqvytlppsrdeltknqvsltclvkgfypsdiavewesngqpennykttppvl |
| | P329A | dsdgsfflyskltvdksrwqqgnvfscsvmhealhnhytqkslslspgk |
| | (GADAPA) | |
| 889 | Human IgG1 | apellgapsvflfppkpkdtlmisrtpevtcvvvavkhedpevkfnwyvdgvevhn |
| | Fc variant | aktkpreeqynstyrvvsvltvlhqdwlngkeykckvsnkalaapiektiskakgq |
| | G237A/D265A/ | prepqvytlppsrdeltknqvsltclvkgfypsdiavewesngqpennykttppvl |
| | P329A/S267K | dsdgsfflyskltvdksrwqqgnvfscsvmhealhnhytqkslslspgk |
| | (GADAPASK) | |
| 890 | Fc | DKTHTCPPCPAPELLGAPSVFLFPPKPKDTLMISRTPEVT |
| | GADAPASK | CVVVAVKHEDPEVKFNWYVDGVEVHNAKTKPREEQYN |
| | (G237A/ | STYRVVSVLTVLHQDWLNGKEYKCKVSNKALAAPIEKT |
| | D265A/ | ISKAKGQPREPQVYTLPPSRREEMKNQVSLTCLVKGFYP |
| | P329A/S267K) | SDIAVEWESNGQPENNYKTTPPVLDSDGSFFLYSKLTVD |
| | | KSRWQQGNVFSCSVMHEALHNHYTQKSLSLSPGK |
| 891 | Human IgG1 | apellggpsvflfppkpkdtlmisrtpevtcvvvavshedpevkfnwyvdgvevhn |
| | Fc variant | aktkpreeqyastyrvvsvltvlhqdwlngkeykckvsnkalaapiektiskakgq |
| | D265A/N297A/ | prepqvytlppsrdeltknqvsltclvkgfypsdiavewesngqpennykttppvl |
| | P329A | dsdgsfflyskltvdksrwqqgnvfscsvmhealhnhytqkslslspgk |
| | (DANAPA) | |
| 673 | NEG2042 LC | DVVMTQSPPSLLVTLGQPASISCRSSQSLLHSSGNTYLN |
| | | WLLQRPGQSPQPLIYLVSKLESGVPDRFSGSGSGTDFTLK |
| | | ISGVEAEDVGVYYCMQFTHYPYTFGQGTKLEIKRTVAAP |
| | | SVFIFPPSDEQLKSGTASVVCLLNNFYPREAKVQWKVDN |
| | | ALQSGNSQESVTEQDSKDSTYSLSSTLTLSKADYEKHKV |
| | | YACEVTHQGLSSPVTKSFNRGEC |
| 703 | NEG2042 HC | QVQLVQSGAEVQRPGASVKVSCKASGYIFTEYYMYWV |
| | | RQAPGQGLELVGRIDPEDGSIDYVEKFKKKVTLTADTSS |
| | | STAYMELSSLTSDDTAVYYCARGKFNYRFAYWGQGTL |
| | | VTVSSASTKGPSVFPLAPSSKSTSGGTAALGCLVKDYFPE |
| | | PVTVSWNSGALTSGVHTFPAVLQSSGLYSLSSVVTVPSS |
| | | SLGTQTYICNVNHKPSNTKVDKRVEPKSCDKTHTCPPCP |
| | | APELLGGPSVFLFPPKPKDTLMISRTPEVTCVVVAVSHED |
| | | PEVKFNWYVDGVEVHNAKTKPREEQYASTYRVVSVLT |
| | | VLHQDWLNGKEYKCKVSNKALAAPIEKTISKAKGQPRE |
| | | PQVYTLPPSREEMTKNQVSLTCLVKGFYPSDIAVEWESN |
| | | GQPENNYKTTPPVLDSDGSFFLYSKLTVDKSRWQQGNV |
| | | FSCSVMHEALHNHYTQKSLSLSPGGGGSGGGGSGGGGS |
| | | GGGGSQVQLVQSGGGVVQPGRSLRLSCKASGYTFTRYT |
| | | MHWVRQAPGKGLEWIGYINPSRGYTNYNQKVKDRFTIS |
| | | RDNSKNTAFLQMDSLRPEDTGVYFCARYYDDHYSLDY |
| | | WGQGTPVTVSSGGGGSGGGGSGGGGSGGGGSDIQMTQ |
| | | SPSSLSASVGDRVTITCSASSSVSYMNWYQQTPGKAPKR |
| | | WIYDTSKLASGVPSRFSGSGSGTDYTFTISSLQPEDIATY |
| | | YCQQWSSNPFTFGQGTKLQIT |
| 518 | NEG2043 LC | DIQMTQSPSSLSASVGDRVTITCHASQNIYVWLNWYQQ |
| | | KPGKAPKLLIYKASNLHTGVPSRFSGSGSGTDFTLTISSL |
| | | QPEDFATYYCQQGQTYPYTFGGGTKVEIKRTVAAPSVFI |
| | | FPPSDEQLKSGTASVVCLLNNFYPREAKVQWKVDNALQ |
| | | SGNSQESVTEQDSKDSTYSLSSTLTLSKADYEKHKVYAC |
| | | EVTHQGLSSPVTKSFNRGEC |
| 704 | NEG2043 HC | QVQLVQSGAEVKKPGASVKVSCKASGYTFTSYYIHWVR |
| | | QAPGQGLEWIGCIYPGNVNTNYNEKFKDRATLTVDTSIS |
| | | TAYMELSRLRSDDTAVYFCTRSHYGLDWNFDVWGQGT |
| | | TVTVSSASTKGPSVFPLAPSSKSTSGGTAALGCLVKDYFP |
| | | EPVTVSWNSGALTSGVHTFPAVLQSSGLYSLSSVVTVPS |
| | | SSLGTQTYICNVNHKPSNTKVDKRVEPKSCDKTHTCPPC |
| | | PAPELLGGPSVFLFPPKPKDTLMISRTPEVTCVVVAVSHE |
| | | DPEVKFNWYVDGVEVHNAKTKPREEQYASTYRVVSVL |
| | | TVLHQDWLNGKEYKCKVSNKALAAPIEKTISKAKGQPR |
| | | EPQVYTLPPSREEMTKNQVSLTCLVKGFYPSDIAVEWES |
| | | NGQPENNYKTTPPVLDSDGSFFLYSKLTVDKSRWQQGN |
| | | VFSCSVMHEALHNHYTQKSLSLSPGGGGSGGGGSGGGG |
| | | SGGGGSQVQLVQSGGGVVQPGRSLRLSCKASGYTFTRY |
| | | TMHWVRQAPGKGLEWIGYINPSRGYTNYNQKVKDRFTI |
| | | SRDNSKNTAFLQMDSLRPEDTGVYFCARYYDDHYSLDY |
| | | WGQGTPVTVSSGGGGSGGGGSGGGGSGGGGSDIQMTQ |
| | | SPSSLSASVGDRVTITCSASSSVSYMNWYQQTPGKAPKR |
| | | WIYDTSKLASGVPSRFSGSGSGTDYTFTISSLQPEDIATY |
| | | YCQQWSSNPFTFGQGTKLQIT |
| 705 | NEG2044 LC | DIVLTQPPSVSGAPGQRVTISCSGSSSNIVSNYVNWYQQL |
| | | PGTAPKLLIYDNNKRPSGVPDRFSGSKSGTSASLAITGLQ |
| | | SEDEADYYCQSYAIGSYSVVFGGGTKLTVLGQGTKVEIK |
| | | RTVAAPSVFIFPPSDEQLKSGTASVVCLLNNFYPREAKV |
| | | QWKVDNALQSGNSQESVTEQDSKDSTYSLSSTLTLSKA |
| | | DYEKHKVYACEVTHQGLSSPVTKSFNRGEC |
| 706 | NEG2044 HC | QVQLVESGGGLVQPGGSLRLSCAASGFTFSTYGMSWVR |
| | | QAPGKGLEWVSSIFYTGSSTYYADSVKGRFTISRDNSKN |
| | | TLYLQMNSLRAEDTAVYYCARIGYAGDSKYAIWGQGTL |
| | | VTVSSASTKGPSVFPLAPSSKSTSGGTAALGCLVKDYFPE |
| | | PVTVSWNSGALTSGVHTFPAVLQSSGLYSLSSVVTVPSS |
| | | SLGTQTYICNVNHKPSNTKVDKRVEPKSCDKTHTCPPCP |
| | | APELLGGPSVFLFPPKPKDTLMISRTPEVTCVVVAVSHED |
| | | PEVKFNWYVDGVEVHNAKTKPREEQYASTYRVVSVLT |
| | | VLHQDWLNGKEYKCKVSNKALAAPIEKTISKAKGQPRE |
| | | PQVYTLPPSREEMTKNQVSLTCLVKGFYPSDIAVEWESN |
| | | GQPENNYKTTPPVLDSDGSFFLYSKLTVDKSRWQQGNV |
| | | FSCSVMHEALHNHYTQKSLSLSPGGGGSGGGGSGGGGS |
| | | GGGGSQVQLVQSGGGVVQPGRSLRLSCKASGYTFTRYT |
| | | MHWVRQAPGKGLEWIGYINPSRGYTNYNQKVKDRFTIS |
| | | RDNSKNTAFLQMDSLRPEDTGVYFCARYYDDHYSLDY |
| | | WGQGTPVTVSSGGGGSGGGGSGGGGSGGGGSDIQMTQ |
| | | SPSSLSASVGDRVTITCSASSSVSYMNWYQQTPGKAPKR |
| | | WIYDTSKLASGVPSRFSGSGSGTDYTFTISSLQPEDIATY |
| | | YCQQWSSNPFTFGQGTKLQIT |
| 673 | NEG2050 LC | DVVMTQSPPSLLVTLGQPASISCRSSQSLLHSSGNTYLN |
| | | WLLQRPGQSPQPLIYLVSKLESGVPDRFSGSGSGTDFTLK |
| | | ISGVEAEDVGVYYCMQFTHYPYTFGQGTKLEIKRTVAAP |
| | | SVFIFPPSDEQLKSGTASVVCLLNNFYPREAKVQWKVDN |
| | | ALQSGNSQESVTEQDSKDSTYSLSSTLTLSKADYEKHKV |
| | | YACEVTHQGLSSPVTKSFNRGEC |
| 707 | NEG2050 HC | QVQLVQSGAEVQRPGASVKVSCKASGYIFTEYYMYWV |
| | | RQAPGQGLELVGRIDPEDGSIDYVEKFKKKVTLTADTSS |
| | | STAYMELSSLTSDDTAVYYCARGKFNYRFAYWGQGTL |
| | | VTVSSASTKGPSVFPLAPSSKSTSGGTAALGCLVKDYFPE |
| | | PVTVSWNSGALTSGVHTFPAVLQSSGLYSLSSVVTVPSS |
| | | SLGTQTYICNVNHKPSNTKVDKRVEPKSCDKTHTCPPCP |
| | | APELLGGPSVFLFPPKPKDTLMISRTPEVTCVVVAVSHED |
| | | PEVKFNWYVDGVEVHNAKTKPREEQYASTYRVVSVLT |
| | | VLHQDWLNGKEYKCKVSNKALAAPIEKTISKAKGQPRE |
| | | PQVYTLPPSREEMTKNQVSLTCLVKGFYPSDIAVEWESN |
| | | GQPENNYKTTPPVLDSDGSFFLYSKLTVDKSRWQQGNV |
| | | FSCSVMHEALHNHYTQKSLSLSPGGGGSGGGGSGGGGS |
| | | GGGGSEVQLVESGGGLVQPGGSLKLSCAASGFTFNKYA |
| | | MNWVRQAPGKCLEWVARIRSKYNNYATYYADSVKDRF |
| | | TISRDDSKNTAYLQMNNLKTEDTAVYYCVRHGNFGNSY |
| | | ISYWAYWGQGTLVTVSSGGGGSGGGGSGGGGSGGGGS |
| | | QTVVTQEPSLTVSPGGTVTLTCGSSTGAVTSGNYPNWV |
| | | QQKPGQAPRGLIGGTKFLAPGTPARFSGSLLGGKAALTL |
| | | SGVQPEDEAEYYCVLWYSNRWVFGCGTKLTVL |
| 673 | NEG2051 LC | DVVMTQSPPSLLVTLGQPASISCRSSQSLLHSSGNTYLN |
| | | WLLQRPGQSPQPLIYLVSKLESGVPDRFSGSGSGTDFTLK |
| | | ISGVEAEDVGVYYCMQFTHYPYTFGQGTKLEIKRTVAAP |
| | | SVFIFPPSDEQLKSGTASVVCLLNNFYPREAKVQWKVDN |
| | | ALQSGNSQESVTEQDSKDSTYSLSSTLTLSKADYEKHKV |
| | | YACEVTHQGLSSPVTKSFNRGEC |
| 708 | NEG2051 HC | QVQLVQSGAEVQRPGASVKVSCKASGYIFTEYYMYWV |
| | | RQAPGQGLELVGRIDPEDGSIDYVEKFKKKVTLTADTSS |
| | | STAYMELSSLTSDDTAVYYCARGKFNYRFAYWGQGTL |
| | | VTVSSASTKGPSVFPLAPSSKSTSGGTAALGCLVKDYFPE |
| | | PVTVSWNSGALTSGVHTFPAVLQSSGLYSLSSVVTVPSS |
| | | SLGTQTYICNVNHKPSNTKVDKRVEPKSCDKTHTCPPCP |
| | | APELLGGPSVFLFPPKPKDTLMISRTPEVTCVVVAVSHED |
| | | PEVKFNWYVDGVEVHNAKTKPREEQYASTYRVVSVLT |
| | | VLHQDWLNGKEYKCKVSNKALAAPIEKTISKAKGQPRE |
| | | PQVYTLPPSREEMTKNQVSLTCLVKGFYPSDIAVEWESN |
| | | GQPENNYKTTPPVLDSDGSFFLYSKLTVDKSRWQQGNV |
| | | FSCSVMHEALHNHYTQKSLSLSPGGGGSGGGGSGGGGS |
| | | GGGGSEVQLVESGGGLVQPGGSLKLSCAASGFTFNTYA |
| | | MNWVRQASGKCLEWVGRIRSKYNNYATYYADSVKDRF |
| | | TISRDDSKSTLYLQMNSLKTEDTAVYYCVRHGNFGNSY |
| | | VSWFAYWGQGTLVTVSSGGGGSGGGGSGGGGSQAVVT |
| | | QEPSLTVSPGGTVTLTCRSSTGAVTTSNYANWVQQKPG |
| | | QAPRGLIGGTNKRAPWTPARFSGSLLGDKAALTLSGAQP |
| | | EDEAEYFCALWYSNLWVFGCGTKLTVL |
| 518 | NEG2052 LC | DIQMTQSPSSLSASVGDRVTITCHASQNIYVWLNWYQQ |
| | | KPGKAPKLLIYKASNLHTGVPSRFSGSGSGTDFTLTISSL |
| | | QPEDFATYYCQQGQTYPYTFGGGTKVEIKRTVAAPSVFI |
| | | FPPSDEQLKSGTASVVCLLNNFYPREAKVQWKVDNALQ |
| | | SGNSQESVTEQDSKDSTYSLSSTLTLSKADYEKHKVYAC |
| | | EVTHQGLSSPVTKSFNRGEC |
| 709 | NEG2052 HC | QVQLVQSGAEVKKPGASVKVSCKASGYTFTSYYIHWVR |
| | | QAPGQGLEWIGCIYPGNVNTNYNEKFKDRATLTVDTSIS |
| | | TAYMELSRLRSDDTAVYFCTRSHYGLDWNFDVWGQGT |
| | | TVTVSSASTKGPSVFPLAPSSKSTSGGTAALGCLVKDYFP |
| | | EPVTVSWNSGALTSGVHTFPAVLQSSGLYSLSSVVTVPS |
| | | SSLGTQTYICNVNHKPSNTKVDKRVEPKSCDKTHTCPPC |
| | | PAPELLGGPSVFLFPPKPKDTLMISRTPEVTCVVVAVSHE |
| | | DPEVKFNWYVDGVEVHNAKTKPREEQYASTYRVVSVL |
| | | TVLHQDWLNGKEYKCKVSNKALAAPIEKTISKAKGQPR |
| | | EPQVYTLPPSREEMTKNQVSLTCLVKGFYPSDIAVEWES |
| | | NGQPENNYKTTPPVLDSDGSFFLYSKLTVDKSRWQQGN |
| | | VFSCSVMHEALHNHYTQKSLSLSPGGGGSGGGGSGGGG |
| | | SGGGGSEVQLVESGGGLVQPGGSLKLSCAASGFTFNKY |
| | | AMNWVRQAPGKCLEWVARIRSKYNNYATYYADSVKD |
| | | RFTISRDDSKNTAYLQMNNLKTEDTAVYYCVRHGNFGN |
| | | SYISYWAYWGQGTLVTVSSGGGGSGGGGSGGGGSGGG |
| | | GSQTVVTQEPSLTVSPGGTVTLTCGSSTGAVTSGNYPNW |
| | | VQQKPGQAPRGLIGGTKFLAPGTPARFSGSLLGGKAALT |
| | | LSGVQPEDEAEYYCVLWYSNRWVFGCGTKLTVL |
| 518 | NEG2053 LC | DIQMTQSPSSLSASVGDRVTITCHASQNIYVWLNWYQQ |
| | | KPGKAPKLLIYKASNLHTGVPSRFSGSGSGTDFTLTISSL |
| | | QPEDFATYYCQQGQTYPYTFGGGTKVEIKRTVAAPSVFI |
| | | FPPSDEQLKSGTASVVCLLNNFYPREAKVQWKVDNALQ |
| | | SGNSQESVTEQDSKDSTYSLSSTLTLSKADYEKHKVYAC |
| | | EVTHQGLSSPVTKSFNRGEC |
| 710 | NEG2053 HC | QVQLVQSGAEVKKPGASVKVSCKASGYTFTSYYIHWVR |
| | | QAPGQGLEWIGCIYPGNVNTNYNEKFKDRATLTVDTSIS |
| | | TAYMELSRLRSDDTAVYFCTRSHYGLDWNFDVWGQGT |
| | | TVTVSSASTKGPSVFPLAPSSKSTSGGTAALGCLVKDYFP |
| | | EPVTVSWNSGALTSGVHTFPAVLQSSGLYSLSSVVTVPS |
| | | SSLGTQTYICNVNHKPSNTKVDKRVEPKSCDKTHTCPPC |
| | | PAPELLGGPSVFLFPPKPKDTLMISRTPEVTCVVVAVSHE |
| | | DPEVKFNWYVDGVEVHNAKTKPREEQYASTYRVVSVL |
| | | TVLHQDWLNGKEYKCKVSNKALAAPIEKTISKAKGQPR |
| | | EPQVYTLPPSREEMTKNQVSLTCLVKGFYPSDIAVEWES |
| | | NGQPENNYKTTPPVLDSDGSFFLYSKLTVDKSRWQQGN |
| | | VFSCSVMHEALHNHYTQKSLSLSPGGGGSGGGGSGGGG |
| | | SGGGGSEVQLVESGGGLVQPGGSLKLSCAASGFTFNTYA |
| | | MNWVRQASGKCLEWVGRIRSKYNNYATYYADSVKDRF |
| | | TISRDDSKSTLYLQMNSLKTEDTAVYYCVRHGNFGNSY |
| | | VSWFAYWGQGTLVTVSSGGGGSGGGGSGGGGSQAVVT |
| | | QEPSLTVSPGGTVTLTCRSSTGAVTTSNYANWVQQKPG |
| | | QAPRGLIGGTNKRAPWTPARFSGSLLGDKAALTLSGAQP |
| | | EDEAEYFCALWYSNLWVFGCGTKLTVL |
| 673 | Construct 1 | DVVMTQSPPSLLVTLGQPASISCRSSQSLLHSSGNTYLN |
| | Light Chain | WLLQRPGQSPQPLIYLVSKLESGVPDRFSGSGSGTDFTLK |
| | | ISGVEAEDVGVYYCMQFTHYPYTFGQGTKLEIKRTVAAP |
| | | SVFIFPPSDEQLKSGTASVVCLLNNFYPREAKVQWKVDN |
| | | ALQSGNSQESVTEQDSKDSTYSLSSTLTLSKADYEKHKV |
| | | YACEVTHQGLSSPVTKSFNRGEC |
| 711 | Construct 1 | QVQLVQSGGGVVQPGRSLRLSCKASGYTFTRYTMHWV |
| | Heavy Chain | RQAPGKGLEWIGYINPSRGYTNYNQKVKDRFTISRDNSK |
| | | NTAFLQMDSLRPEDTGVYFCARYYDDHYSLDYWGQGT |
| | | PVTVSSGGGGSGGGGSGGGGSGGGGSDIQMTQSPSSLSA |
| | | SVGDRVTITCSASSSVSYMNWYQQTPGKAPKRWIYDTS |
| | | KLASGVPSRFSGSGSGTDYTFTISSLQPEDIATYYCQQWS |
| | | SNPFTFGQGTKLQITGGGGSGGGGSGGGGSGGGGSQVQ |
| | | LVQSGAEVQRPGASVKVSCKASGYIFTEYYMYWVRQAP |
| | | GQGLELVGRIDPEDGSIDYVEKFKKKVTLTADTSSSTAY |
| | | MELSSLTSDDTAVYYCARGKFNYRFAYWGQGTLVTVSS |
| | | ASTKGPSVFPLAPSSKSTSGGTAALGCLVKDYFPEPVTVS |
| | | WNSGALTSGVHTFPAVLQSSGLYSLSSVVTVPSSSLGTQ |
| | | TYICNVNHKPSNTKVDKRVEPKSCDKTHTCPPCPAPELL |
| | | GGPSVFLFPPKPKDTLMISRTPEVTCVVVDVSHEDPEVKF |
| | | NWYVDGVEVHNAKTKPREEQYNSTYRVVSVLTVLHQD |
| | | WLNGKEYKCKVSNKALPAPIEKTISKAKGQPREPQVYTL |
| | | PPSREEMTKNQVSLTCLVKGFYPSDIAVEWESNGQPENN |
| | | YKTTPPVLDSDGSFFLYSKLTVDKSRWQQGNVFSCSVM |
| | | HEALHNHYTQKSLSLSPGK |
| 518 | Construct 2 | DIQMTQSPSSLSASVGDRVTITCHASQNIYVWLNWYQQ |
| | Light Chain | KPGKAPKLLIYKASNLHTGVPSRFSGSGSGTDFTLTISSL |
| | | QPEDFATYYCQQGQTYPYTFGGGTKVEIKRTVAAPSVFI |
| | | FPPSDEQLKSGTASVVCLLNNFYPREAKVQWKVDNALQ |
| | | SGNSQESVTEQDSKDSTYSLSSTLTLSKADYEKHKVYAC |
| | | EVTHQGLSSPVTKSFNRGEC |
| 712 | Construct 2 | QVQLVQSGGGVVQPGRSLRLSCKASGYTFTRYTMHWV |
| | Heavy Chain | RQAPGKGLEWIGYINPSRGYTNYNQKVKDRFTISRDNSK |
| | | NTAFLQMDSLRPEDTGVYFCARYYDDHYSLDYWGQGT |
| | | PVTVSSGGGGSGGGGSGGGGSGGGGSDIQMTQSPSSLSA |
| | | SVGDRVTITCSASSSVSYMNWYQQTPGKAPKRWIYDTS |
| | | KLASGVPSRFSGSGSGTDYTFTISSLQPEDIATYYCQQWS |
| | | SNPFTFGQGTKLQITGGGGSGGGGSGGGGSGGGGSQVQ |
| | | LVQSGAEVKKPGASVKVSCKASGYTFTSYYIHWVRQAP |
| | | GQGLEWIGCIYPGNVNTNYNEKFKDRATLTVDTSISTAY |
| | | MELSRLRSDDTAVYFCTRSHYGLDWNFDVWGQGTTVT |
| | | VSSASTKGPSVFPLAPSSKSTSGGTAALGCLVKDYFPEPV |
| | | TVSWNSGALTSGVHTFPAVLQSSGLYSLSSVVTVPSSSL |
| | | GTQTYICNVNHKPSNTKVDKRVEPKSCDKTHTCPPCPAP |
| | | ELLGGPSVFLFPPKPKDTLMISRTPEVTCVVVDVSHEDPE |
| | | VKFNWYVDGVEVHNAKTKPREEQYNSTYRVVSVLTVL |
| | | HQDWLNGKEYKCKVSNKALPAPIEKTISKAKGQPREPQ |
| | | VYTLPPSREEMTKNQVSLTCLVKGFYPSDIAVEWESNGQ |
| | | PENNYKTTPPVLDSDGSFFLYSKLTVDKSRWQQGNVFSC |
| | | SVMHEALHNHYTQKSLSLSPGK |
| 673 | Construct 3 | DVVMTQSPPSLLVTLGQPASISCRSSQSLLHSSGNTYLN |
| | Light Chain | WLLQRPGQSPQPLIYLVSKLESGVPDRFSGSGSGTDFTLK |
| | | ISGVEAEDVGVYYCMQFTHYPYTFGQGTKLEIKRTVAAP |
| | | SVFIFPPSDEQLKSGTASVVCLLNNFYPREAKVQWKVDN |
| | | ALQSGNSQESVTEQDSKDSTYSLSSTLTLSKADYEKHKV |
| | | YACEVTHQGLSSPVTKSFNRGEC |
| 713 | Construct 3 | QVQLVQSGAEVQRPGASVKVSCKASGYIFTEYYMYWV |
| | Heavy Chain | RQAPGQGLELVGRIDPEDGSIDYVEKFKKKVTLTADTSS |
| | | STAYMELSSLTSDDTAVYYCARGKFNYRFAYWGQGTL |
| | | VTVSSASTKGPSVFPLAPSSKSTSGGTAALGCLVKDYFPE |
| | | PVTVSWNSGALTSGVHTFPAVLQSSGLYSLSSVVTVPSS |
| | | SLGTQTYICNVNHKPSNTKVDKRVEPKSCDKTHTCPPCP |
| | | APELLGGPSVFLFPPKPKDTLMISRTPEVTCVVVDVSHED |
| | | PEVKFNWYVDGVEVHNAKTKPREEQYNSTYRVVSVLT |
| | | VLHQDWLNGKEYKCKVSNKALPAPIEKTISKAKGQPREP |
| | | QVYTLPPSREEMTKNQVSLTCLVKGFYPSDIAVEWESNG |
| | | QPENNYKTTPPVLDSDGSFFLYSKLTVDKSRWQQGNVF |
| | | SCSVMHEALHNHYTQKSLSLSPGGGGSGGGGSGGGGSG |
| | | GGGSQVQLVQSGGGVVQPGRSLRLSCKASGYTFTRYTM |
| | | HWVRQAPGKGLEWIGYINPSRGYTNYNQKVKDRFTISR |
| | | DNSKNTAFLQMDSLRPEDTGVYFCARYYDDHYSLDYW |
| | | GQGTPVTVSSGGGGSGGGGSGGGGSGGGGSDIQMTQSP |
| | | SSLSASVGDRVTITCSASSSVSYMNWYQQTPGKAPKRWI |
| | | YDTSKLASGVPSRFSGSGSGTDYTFTISSLQPEDIATYYC |
| | | QQWSSNPFTFGQGTKLQIT |
| 518 | Construct 4 | DIQMTQSPSSLSASVGDRVTITCHASQNIYVWLNWYQQ |
| | Light Chain | KPGKAPKLLIYKASNLHTGVPSRFSGSGSGTDFTLTISSL |
| | | QPEDFATYYCQQGQTYPYTFGGGTKVEIKRTVAAPSVFI |
| | | FPPSDEQLKSGTASVVCLLNNFYPREAKVQWKVDNALQ |
| | | SGNSQESVTEQDSKDSTYSLSSTLTLSKADYEKHKVYAC |
| | | EVTHQGLSSPVTKSFNRGEC |
| 714 | Construct 4 | QVQLVQSGAEVKKPGASVKVSCKASGYTFTSYYIHWVR |
| | Heavy Chain | QAPGQGLEWIGCIYPGNVNTNYNEKFKDRATLTVDTSIS |
| | | TAYMELSRLRSDDTAVYFCTRSHYGLDWNFDVWGQGT |
| | | TVTVSSASTKGPSVFPLAPSSKSTSGGTAALGCLVKDYFP |
| | | EPVTVSWNSGALTSGVHTFPAVLQSSGLYSLSSVVTVPS |
| | | SSLGTQTYICNVNHKPSNTKVDKRVEPKSCDKTHTCPPC |
| | | PAPELLGGPSVFLFPPKPKDTLMISRTPEVTCVVVDVSHE |
| | | DPEVKFNWYVDGVEVHNAKTKPREEQYNSTYRVVSVL |
| | | TVLHQDWLNGKEYKCKVSNKALPAPIEKTISKAKGQPR |
| | | EPQVYTLPPSREEMTKNQVSLTCLVKGFYPSDIAVEWES |
| | | NGQPENNYKTTPPVLDSDGSFFLYSKLTVDKSRWQQGN |
| | | VFSCSVMHEALHNHYTQKSLSLSPGGGGSGGGGSGGGG |
| | | SGGGGSQVQLVQSGGGVVQPGRSLRLSCKASGYTFTRY |
| | | TMHWVRQAPGKGLEWIGYINPSRGYTNYNQKVKDRFTI |
| | | SRDNSKNTAFLQMDSLRPEDTGVYFCARYYDDHYSLDY |
| | | WGQGTPVTVSSGGGGSGGGGSGGGGSGGGGSDIQMTQ |
| | | SPSSLSASVGDRVTITCSASSSVSYMNWYQQTPGKAPKR |
| | | WIYDTSKLASGVPSRFSGSGSGTDYTFTISSLQPEDIATY |
| | | YCQQWSSNPFTFGQGTKLQIT |
| 673 | Construct 5 | DVVMTQSPPSLLVTLGQPASISCRSSQSLLHSSGNTYLN |
| | Light Chain | WLLQRPGQSPQPLIYLVSKLESGVPDRFSGSGSGTDFTLK |
| | | ISGVEAEDVGVYYCMQFTHYPYTFGQGTKLEIKRTVAAP |
| | | SVFIFPPSDEQLKSGTASVVCLLNNFYPREAKVQWKVDN |
| | | ALQSGNSQESVTEQDSKDSTYSLSSTLTLSKADYEKHKV |
| | | YACEVTHQGLSSPVTKSFNRGEC |
| 715 | Construct 5 | QVQLVQSGAEVQRPGASVKVSCKASGYIFTEYYMYWV |
| | Heavy Chain | RQAPGQGLELVGRIDPEDGSIDYVEKFKKKVTLTADTSS |
| | | STAYMELSSLTSDDTAVYYCARGKFNYRFAYWGQGTL |
| | | VTVSSASTKGPSVFPLAPSSKSTSGGTAALGCLVKDYFPE |
| | | PVTVSWNSGALTSGVHTFPAVLQSSGLYSLSSVVTVPSS |
| | | SLGTQTYICNVNHKPSNTKVDKRVEPKSCGGGGSGGGG |
| | | SQVQLVQSGGGVVQPGRSLRLSCKASGYTFTRYTMHW |
| | | VRQAPGKGLEWIGYINPSRGYTNYNQKVKDRFTISRDNS |
| | | KNTAFLQMDSLRPEDTGVYFCARYYDDHYSLDYWGQG |
| | | TPVTVSSGGGGSGGGGSGGGGSGGGGSDIQMTQSPSSLS |
| | | ASVGDRVTITCSASSSVSYMNWYQQTPGKAPKRWIYDT |
| | | SKLASGVPSRFSGSGSGTDYTFTISSLQPEDIATYYCQQW |
| | | SSNPFTFGQGTKLQITGGGGSGGGGSGGGGSGGGGSDKT |
| | | HTCPPCPAPELLGGPSVFLFPPKPKDTLMISRTPEVTCVV |
| | | VDVSHEDPEVKFNWYVDGVEVHNAKTKPREEQYNSTY |
| | | RVVSVLTVLHQDWLNGKEYKCKVSNKALPAPIEKTISK |
| | | AKGQPREPQVYTLPPSREEMTKNQVSLTCLVKGFYPSDI |
| | | AVEWESNGQPENNYKTTPPVLDSDGSFFLYSKLTVDKSR |
| | | WQQGNVFSCSVMHEALHNHYTQKSLSLSPGK |
| 518 | Construct 6 | DIQMTQSPSSLSASVGDRVTITCHASQNIYVWLNWYQQ |
| | Light Chain | KPGKAPKLLIYKASNLHTGVPSRFSGSGSGTDFTLTISSL |
| | | QPEDFATYYCQQGQTYPYTFGGGTKVEIKRTVAAPSVFI |
| | | FPPSDEQLKSGTASVVCLLNNFYPREAKVQWKVDNALQ |
| | | SGNSQESVTEQDSKDSTYSLSSTLTLSKADYEKHKVYAC |
| | | EVTHQGLSSPVTKSFNRGEC |
| 716 | Construct 6 | QVQLVQSGAEVKKPGASVKVSCKASGYTFTSYYIHWVR |
| | Heavy Chain | QAPGQGLEWIGCIYPGNVNTNYNEKFKDRATLTVDTSIS |
| | | TAYMELSRLRSDDTAVYFCTRSHYGLDWNFDVWGQGT |
| | | TVTVSSASTKGPSVFPLAPSSKSTSGGTAALGCLVKDYFP |
| | | EPVTVSWNSGALTSGVHTFPAVLQSSGLYSLSSVVTVPS |
| | | SSLGTQTYICNVNHKPSNTKVDKRVEPKSCGGGGSGGG |
| | | GSQVQLVQSGGGVVQPGRSLRLSCKASGYTFTRYTMH |
| | | WVRQAPGKGLEWIGYINPSRGYTNYNQKVKDRFTISRD |
| | | NSKNTAFLQMDSLRPEDTGVYFCARYYDDHYSLDYWG |
| | | QGTPVTVSSGGGGSGGGGSGGGGSGGGGSDIQMTQSPS |
| | | SLSASVGDRVTITCSASSSVSYMNWYQQTPGKAPKRWI |
| | | YDTSKLASGVPSRFSGSGSGTDYTFTISSLQPEDIATYYC |
| | | QQWSSNPFTFGQGTKLQITGGGGSGGGGSGGGGSGGGG |
| | | SDKTHTCPPCPAPELLGGPSVFLFPPKPKDTLMISRTPEVT |
| | | CVVVDVSHEDPEVKFNWYVDGVEVHNAKTKPREEQYN |
| | | STYRVVSVLTVLHQDWLNGKEYKCKVSNKALPAPIEKTI |
| | | SKAKGQPREPQVYTLPPSREEMTKNQVSLTCLVKGFYPS |
| | | DIAVEWESNGQPENNYKTTPPVLDSDGSFFLYSKLTVDK |
| | | SRWQQGNVFSCSVMHEALHNHYTQKSLSLSPGK |
| 673 | Construct 7 | DVVMTQSPPSLLVTLGQPASISCRSSQSLLHSSGNTYLN |
| | Light Chain | WLLQRPGQSPQPLIYLVSKLESGVPDRFSGSGSGTDFTLK |
| | | ISGVEAEDVGVYYCMQFTHYPYTFGQGTKLEIKRTVAAP |
| | | SVFIFPPSDEQLKSGTASVVCLLNNFYPREAKVQWKVDN |
| | | ALQSGNSQESVTEQDSKDSTYSLSSTLTLSKADYEKHKV |
| | | YACEVTHQGLSSPVTKSFNRGEC |
| 717 | Construct 7 | QVQLVQSGGGVVQPGRSLRLSCKASGYTFTRYTMHWV |
| | Heavy Chain | RQAPGKGLEWIGYINPSRGYTNYNQKVKDRFTISRDNSK |
| | | NTAFLQMDSLRPEDTGVYFCARYYDDHYSLDYWGQGT |
| | | PVTVSSGGGGSGGGGSGGGGSGGGGSDIQMTQSPSSLSA |
| | | SVGDRVTITCSASSSVSYMNWYQQTPGKAPKRWIYDTS |
| | | KLASGVPSRFSGSGSGTDYTFTISSLQPEDIATYYCQQWS |
| | | SNPFTFGQGTKLQITGGGGSDKTHTCPPCPAPELLGGPSV |
| | | FLFPPKPKDTLMISRTPEVTCVVVDVSHEDPEVKFNWYV |
| | | DGVEVHNAKTKPREEQYNSTYRVVSVLTVLHQDWLNG |
| | | KEYKCKVSNKALPAPIEKTISKAKGQPREPQVYTLPPSRE |
| | | EMTKNQVSLTCLVKGFYPSDIAVEWESNGQPENNYKTT |
| | | PPVLDSDGSFFLYSKLTVDKSRWQQGNVFSCSVMHEAL |
| | | HNHYTQKSLSLSPGGGGSGGGGSGGGGSGGGGSQVQLV |
| | | QSGAEVQRPGASVKVSCKASGYIFTEYYMYWVRQAPG |
| | | QGLELVGRIDPEDGSIDYVEKFKKKVTLTADTSSSTAYM |
| | | ELSSLTSDDTAVYYCARGKFNYRFAYWGQGTLVTVSSA |
| | | STKGPSVFPLAPSSKSTSGGTAALGCLVKDYFPEPVTVS |
| | | WNSGALTSGVHTFPAVLQSSGLYSLSSVVTVPSSSLGTQ |
| | | TYICNVNHKPSNTKVDKRVEPKSC |
| 518 | Construct 8 | DIQMTQSPSSLSASVGDRVTITCHASQNIYVWLNWYQQ |
| | Light Chain | KPGKAPKLLIYKASNLHTGVPSRFSGSGSGTDFTLTISSL |
| | | QPEDFATYYCQQGQTYPYTFGGGTKVEIKRTVAAPSVFI |
| | | FPPSDEQLKSGTASVVCLLNNFYPREAKVQWKVDNALQ |
| | | SGNSQESVTEQDSKDSTYSLSSTLTLSKADYEKHKVYAC |
| | | EVTHQGLSSPVTKSFNRGEC |
| 718 | Construct 8 | QVQLVQSGGGVVQPGRSLRLSCKASGYTFTRYTMHWV |
| | Heavy Chain | RQAPGKGLEWIGYINPSRGYTNYNQKVKDRFTISRDNSK |
| | | NTAFLQMDSLRPEDTGVYFCARYYDDHYSLDYWGQGT |
| | | PVTVSSGGGGSGGGGSGGGGSGGGGSDIQMTQSPSSLSA |
| | | SVGDRVTITCSASSSVSYMNWYQQTPGKAPKRWIYDTS |
| | | KLASGVPSRFSGSGSGTDYTFTISSLQPEDIATYYCQQWS |
| | | SNPFTFGQGTKLQITGGGGSDKTHTCPPCPAPELLGGPSV |
| | | FLFPPKPKDTLMISRTPEVTCVVVDVSHEDPEVKFNWYV |
| | | DGVEVHNAKTKPREEQYNSTYRVVSVLTVLHQDWLNG |
| | | KEYKCKVSNKALPAPIEKTISKAKGQPREPQVYTLPPSRE |
| | | EMTKNQVSLTCLVKGFYPSDIAVEWESNGQPENNYKTT |
| | | PPVLDSDGSFFLYSKLTVDKSRWQQGNVFSCSVMHEAL |
| | | HNHYTQKSLSLSPGGGGSGGGGSGGGGSGGGGSQVQLV |
| | | QSGAEVKKPGASVKVSCKASGYTFTSYYIHWVRQAPGQ |
| | | GLEWIGCIYPGNVNTNYNEKFKDRATLTVDTSISTAYME |
| | | LSRLRSDDTAVYFCTRSHYGLDWNFDVWGQGTTVTVSS |
| | | ASTKGPSVFPLAPSSKSTSGGTAALGCLVKDYFPEPVTVS |
| | | WNSGALTSGVHTFPAVLQSSGLYSLSSVVTVPSSSLGTQ |
| | | TYICNVNHKPSNTKVDKRVEPKSC |
| 673 | Construct 9 | DVVMTQSPPSLLVTLGQPASISCRSSQSLLHSSGNTYLN |
| | Light Chain | WLLQRPGQSPQPLIYLVSKLESGVPDRFSGSGSGTDFTLK |
| | | ISGVEAEDVGVYYCMQFTHYPYTFGQGTKLEIKRTVAAP |
| | | SVFIFPPSDEQLKSGTASVVCLLNNFYPREAKVQWKVDN |
| | | ALQSGNSQESVTEQDSKDSTYSLSSTLTLSKADYEKHKV |
| | | YACEVTHQGLSSPVTKSFNRGEC |
| 719 | Construct 9 | QVQLVQSGAEVQRPGASVKVSCKASGYIFTEYYMYWV |
| | Heavy Chain 1 | RQAPGQGLELVGRIDPEDGSIDYVEKFKKKVTLTADTSS |
| | | STAYMELSSLTSDDTAVYYCARGKFNYRFAYWGQGTL |
| | | VTVSSASTKGPSVFPLAPSSKSTSGGTAALGCLVKDYFPE |
| | | PVTVSWNSGALTSGVHTFPAVLQSSGLYSLSSVVTVPSS |
| | | SLGTQTYICNVNHKPSNTKVDKRVEPKSCDKTHTCPPCP |
| | | APELLGGPSVFLFPPKPKDTLMISRTPEVTCVVVDVSHED |
| | | PEVKFNWYVDGVEVHNAKTKPREEQYNSTYRVVSVLT |
| | | VLHQDWLNGKEYKCKVSNKALPAPIEKTISKAKGQPREP |
| | | QVCTLPPSREEMTKNQVSLSCAVKGFYPSDIAVEWESNG |
| | | QPENNYKTTPPVLDSDGSFFLVSKLTVDKSRWQQGNVF |
| | | SCSVMHEALHNRFTQKSLSLSPGK |
| 720 | Construct 9 | QVQLVQSGGGVVQPGRSLRLSCKASGYTFTRYTMHWV |
| | Heavy Chain 2 | RQAPGKGLEWIGYINPSRGYTNYNQKVKDRFTISRDNSK |
| | | NTAFLQMDSLRPEDTGVYFCARYYDDHYSLDYWGQGT |
| | | PVTVSSGGGGSGGGGSGGGGSGGGGSDIQMTQSPSSLSA |
| | | SVGDRVTITCSASSSVSYMNWYQQTPGKAPKRWIYDTS |
| | | KLASGVPSRFSGSGSGTDYTFTISSLQPEDIATYYCQQWS |
| | | SNPFTFGQGTKLQITGGGGSDKTHTCPPCPAPELLGGPSV |
| | | FLFPPKPKDTLMISRTPEVTCVVVDVSHEDPEVKFNWYV |
| | | DGVEVHNAKTKPREEQYNSTYRVVSVLTVLHQDWLNG |
| | | KEYKCKVSNKALPAPIEKTISKAKGQPREPQVYTLPPCRE |
| | | EMTKNQVSLWCLVKGFYPSDIAVEWESNGQPENNYKTT |
| | | PPVLDSDGSFFLYSKLTVDKSRWQQGNVFSCSVMHEAL |
| | | HNHYTQKSLSLSPGK |
| 518 | Construct 10 | DIQMTQSPSSLSASVGDRVTITCHASQNIYVWLNWYQQ |
| | Light Chain | KPGKAPKLLIYKASNLHTGVPSRFSGSGSGTDFTLTISSL |
| | | QPEDFATYYCQQGQTYPYTFGGGTKVEIKRTVAAPSVFI |
| | | FPPSDEQLKSGTASVVCLLNNFYPREAKVQWKVDNALQ |
| | | SGNSQESVTEQDSKDSTYSLSSTLTLSKADYEKHKVYAC |
| | | EVTHQGLSSPVTKSFNRGEC |
| 721 | Construct 10 | QVQLVQSGAEVKKPGASVKVSCKASGYTFTSYYIHWVR |
| | Heavy Chain 1 | QAPGQGLEWIGCIYPGNVNTNYNEKFKDRATLTVDTSIS |
| | | TAYMELSRLRSDDTAVYFCTRSHYGLDWNFDVWGQGT |
| | | TVTVSSASTKGPSVFPLAPSSKSTSGGTAALGCLVKDYFP |
| | | EPVTVSWNSGALTSGVHTFPAVLQSSGLYSLSSVVTVPS |
| | | SSLGTQTYICNVNHKPSNTKVDKRVEPKSCDKTHTCPPC |
| | | PAPELLGGPSVFLFPPKPKDTLMISRTPEVTCVVVDVSHE |
| | | DPEVKFNWYVDGVEVHNAKTKPREEQYNSTYRVVSVL |
| | | TVLHQDWLNGKEYKCKVSNKALPAPIEKTISKAKGQPR |
| | | EPQVCTLPPSREEMTKNQVSLSCAVKGFYPSDIAVEWES |
| | | NGQPENNYKTTPPVLDSDGSFFLVSKLTVDKSRWQQGN |
| | | VFSCSVMHEALHNRFTQKSLSLSPGK |
| 720 | Construct 10 | QVQLVQSGGGVVQPGRSLRLSCKASGYTFTRYTMHWV |
| | Heavy Chain 2 | RQAPGKGLEWIGYINPSRGYTNYNQKVKDRFTISRDNSK |
| | | NTAFLQMDSLRPEDTGVYFCARYYDDHYSLDYWGQGT |
| | | PVTVSSGGGGSGGGGSGGGGSGGGGSDIQMTQSPSSLSA |
| | | SVGDRVTITCSASSSVSYMNWYQQTPGKAPKRWIYDTS |
| | | KLASGVPSRFSGSGSGTDYTFTISSLQPEDIATYYCQQWS |
| | | SNPFTFGQGTKLQITGGGGSDKTHTCPPCPAPELLGGPSV |
| | | FLFPPKPKDTLMISRTPEVTCVVVDVSHEDPEVKFNWYV |
| | | DGVEVHNAKTKPREEQYNSTYRVVSVLTVLHQDWLNG |
| | | KEYKCKVSNKALPAPIEKTISKAKGQPREPQVYTLPPCRE |
| | | EMTKNQVSLWCLVKGFYPSDIAVEWESNGQPENNYKTT |
| | | PPVLDSDGSFFLYSKLTVDKSRWQQGNVFSCSVMHEAL |
| | | HNHYTQKSLSLSPGK |
| 722 | Construct 11 | DKTHTCPPCPAPELLGGPSVFLFPPKPKDTLMISRTPEVT |
| | Heavy Chain 1 | CVVVDVSHEDPEVKFNWYVDGVEVHNAKTKPREEQYN |
| | | STYRVVSVLTVLHQDWLNGKEYKCKVSNKALPAPIEKTI |
| | | SKAKGQPREPQVCTLPPSREEMTKNQVSLSCAVKGFYPS |
| | | DIAVEWESNGQPENNYKTTPPVLDSDGSFFLVSKLTVDK |
| | | SRWQQGNVFSCSVMHEALHNRFTQKSLSLSPGK |
| 720 | Construct 11 | QVQLVQSGGGVVQPGRSLRLSCKASGYTFTRYTMHWV |
| | Heavy Chain 2 | RQAPGKGLEWIGYINPSRGYTNYNQKVKDRFTISRDNSK |
| | | NTAFLQMDSLRPEDTGVYFCARYYDDHYSLDYWGQGT |
| | | PVTVSSGGGGSGGGGSGGGGSGGGGSDIQMTQSPSSLSA |
| | | SVGDRVTITCSASSSVSYMNWYQQTPGKAPKRWIYDTS |
| | | KLASGVPSRFSGSGSGTDYTFTISSLQPEDIATYYCQQWS |
| | | SNPFTFGQGTKLQITGGGGSDKTHTCPPCPAPELLGGPSV |
| | | FLFPPKPKDTLMISRTPEVTCVVVDVSHEDPEVKFNWYV |
| | | DGVEVHNAKTKPREEQYNSTYRVVSVLTVLHQDWLNG |
| | | KEYKCKVSNKALPAPIEKTISKAKGQPREPQVYTLPPCRE |
| | | EMTKNQVSLWCLVKGFYPSDIAVEWESNGQPENNYKTT |
| | | PPVLDSDGSFFLYSKLTVDKSRWQQGNVFSCSVMHEAL |
| | | HNHYTQKSLSLSPGK |
| 673 | Construct 12 | DVVMTQSPPSLLVTLGQPASISCRSSQSLLHSSGNTYLN |
| | Light Chain | WLLQRPGQSPQPLIYLVSKLESGVPDRFSGSGSGTDFTLK |
| | | ISGVEAEDVGVYYCMQFTHYPYTFGQGTKLEIKRTVAAP |
| | | SVFIFPPSDEQLKSGTASVVCLLNNFYPREAKVQWKVDN |
| | | ALQSGNSQESVTEQDSKDSTYSLSSTLTLSKADYEKHKV |
| | | YACEVTHQGLSSPVTKSFNRGEC |
| 719 | Construct 12 | QVQLVQSGAEVQRPGASVKVSCKASGYIFTEYYMYWV |
| | Heavy Chain 1 | RQAPGQGLELVGRIDPEDGSIDYVEKFKKKVTLTADTSS |
| | | STAYMELSSLTSDDTAVYYCARGKFNYRFAYWGQGTL |
| | | VTVSSASTKGPSVFPLAPSSKSTSGGTAALGCLVKDYFPE |
| | | PVTVSWNSGALTSGVHTFPAVLQSSGLYSLSSVVTVPSS |
| | | SLGTQTYICNVNHKPSNTKVDKRVEPKSCDKTHTCPPCP |
| | | APELLGGPSVFLFPPKPKDTLMISRTPEVTCVVVDVSHED |
| | | PEVKFNWYVDGVEVHNAKTKPREEQYNSTYRVVSVLT |
| | | VLHQDWLNGKEYKCKVSNKALPAPIEKTISKAKGQPREP |
| | | QVCTLPPSREEMTKNQVSLSCAVKGFYPSDIAVEWESNG |
| | | QPENNYKTTPPVLDSDGSFFLVSKLTVDKSRWQQGNVF |
| | | SCSVMHEALHNRFTQKSLSLSPGK |
| 723 | Construct 12 | QVQLVQSGGGVVQPGRSLRLSCKASGYTFTRYTMHWV |
| | Heavy Chain 2 | RQAPGKGLEWIGYINPSRGYTNYNQKVKDRFTISRDNSK |
| | | NTAFLQMDSLRPEDTGVYFCARYYDDHYSLDYWGQGT |
| | | PVTVSSGGGGSGGGGSGGGGSGGGGSDIQMTQSPSSLSA |
| | | SVGDRVTITCSASSSVSYMNWYQQTPGKAPKRWIYDTS |
| | | KLASGVPSRFSGSGSGTDYTFTISSLQPEDIATYYCQQWS |
| | | SNPFTFGQGTKLQITGGGGSDKTHTCPPCPAPELLGGPSV |
| | | FLFPPKPKDTLMISRTPEVTCVVVDVSHEDPEVKFNWYV |
| | | DGVEVHNAKTKPREEQYNSTYRVVSVLTVLHQDWLNG |
| | | KEYKCKVSNKALPAPIEKTISKAKGQPREPQVYTLPPCRE |
| | | EMTKNQVSLWCLVKGFYPSDIAVEWESNGQPENNYKTT |
| | | PPVLDSDGSFFLYSKLTVDKSRWQQGNVFSCSVMHEAL |
| | | HNHYTQKSLSLSPGGGGGSGGGGSGGGGSEEDPCACES |
| | | LVKFQAKVEGLLQALTRKLEAVSKRLAILENTVV |
| 518 | Construct 13 | DIQMTQSPSSLSASVGDRVTITCHASQNIYVWLNWYQQ |
| | Light Chain | KPGKAPKLLIYKASNLHTGVPSRFSGSGSGTDFTLTISSL |
| | | QPEDFATYYCQQGQTYPYTFGGGTKVEIKRTVAAPSVFI |
| | | FPPSDEQLKSGTASVVCLLNNFYPREAKVQWKVDNALQ |
| | | SGNSQESVTEQDSKDSTYSLSSTLTLSKADYEKHKVYAC |
| | | EVTHQGLSSPVTKSFNRGEC |
| 721 | Construct 13 | QVQLVQSGAEVKKPGASVKVSCKASGYTFTSYYIHWVR |
| | Heavy Chain 1 | QAPGQGLEWIGCIYPGNVNTNYNEKFKDRATLTVDTSIS |
| | | TAYMELSRLRSDDTAVYFCTRSHYGLDWNFDVWGQGT |
| | | TVTVSSASTKGPSVFPLAPSSKSTSGGTAALGCLVKDYFP |
| | | EPVTVSWNSGALTSGVHTFPAVLQSSGLYSLSSVVTVPS |
| | | SSLGTQTYICNVNHKPSNTKVDKRVEPKSCDKTHTCPPC |
| | | PAPELLGGPSVFLFPPKPKDTLMISRTPEVTCVVVDVSHE |
| | | DPEVKFNWYVDGVEVHNAKTKPREEQYNSTYRVVSVL |
| | | TVLHQDWLNGKEYKCKVSNKALPAPIEKTISKAKGQPR |
| | | EPQVCTLPPSREEMTKNQVSLSCAVKGFYPSDIAVEWES |
| | | NGQPENNYKTTPPVLDSDGSFFLVSKLTVDKSRWQQGN |
| | | VFSCSVMHEALHNRFTQKSLSLSPGK |
| 723 | Construct 13 | QVQLVQSGGGVVQPGRSLRLSCKASGYTFTRYTMHWV |
| | Heavy Chain 2 | RQAPGKGLEWIGYINPSRGYTNYNQKVKDRFTISRDNSK |
| | | NTAFLQMDSLRPEDTGVYFCARYYDDHYSLDYWGQGT |
| | | PVTVSSGGGGSGGGGSGGGGSGGGGSDIQMTQSPSSLSA |
| | | SVGDRVTITCSASSSVSYMNWYQQTPGKAPKRWIYDTS |
| | | KLASGVPSRFSGSGSGTDYTFTISSLQPEDIATYYCQQWS |
| | | SNPFTFGQGTKLQITGGGGSDKTHTCPPCPAPELLGGPSV |
| | | FLFPPKPKDTLMISRTPEVTCVVVDVSHEDPEVKFNWYV |
| | | DGVEVHNAKTKPREEQYNSTYRVVSVLTVLHQDWLNG |
| | | KEYKCKVSNKALPAPIEKTISKAKGQPREPQVYTLPPCRE |
| | | EMTKNQVSLWCLVKGFYPSDIAVEWESNGQPENNYKTT |
| | | PPVLDSDGSFFLYSKLTVDKSRWQQGNVFSCSVMHEAL |
| | | HNHYTQKSLSLSPGGGGGSGGGGSGGGGSEEDPCACES |
| | | LVKFQAKVEGLLQALTRKLEAVSKRLAILENTVV |
| 722 | Construct 14 | DKTHTCPPCPAPELLGGPSVFLFPPKPKDTLMISRTPEVT |
| | Heavy Chain 1 | CVVVDVSHEDPEVKFNWYVDGVEVHNAKTKPREEQYN |
| | | STYRVVSVLTVLHQDWLNGKEYKCKVSNKALPAPIEKTI |
| | | SKAKGQPREPQVCTLPPSREEMTKNQVSLSCAVKGFYPS |
| | | DIAVEWESNGQPENNYKTTPPVLDSDGSFFLVSKLTVDK |
| | | SRWQQGNVFSCSVMHEALHNRFTQKSLSLSPGK |
| 723 | Construct 14 | QVQLVQSGGGVVQPGRSLRLSCKASGYTFTRYTMHWV |
| | Heavy Chain 2 | RQAPGKGLEWIGYINPSRGYTNYNQKVKDRFTISRDNSK |
| | | NTAFLQMDSLRPEDTGVYFCARYYDDHYSLDYWGQGT |
| | | PVTVSSGGGGSGGGGSGGGGSGGGGSDIQMTQSPSSLSA |
| | | SVGDRVTITCSASSSVSYMNWYQQTPGKAPKRWIYDTS |
| | | KLASGVPSRFSGSGSGTDYTFTISSLQPEDIATYYCQQWS |
| | | SNPFTFGQGTKLQITGGGGSDKTHTCPPCPAPELLGGPSV |
| | | FLFPPKPKDTLMISRTPEVTCVVVDVSHEDPEVKFNWYV |
| | | DGVEVHNAKTKPREEQYNSTYRVVSVLTVLHQDWLNG |
| | | KEYKCKVSNKALPAPIEKTISKAKGQPREPQVYTLPPCRE |
| | | EMTKNQVSLWCLVKGFYPSDIAVEWESNGQPENNYKTT |
| | | PPVLDSDGSFFLYSKLTVDKSRWQQGNVFSCSVMHEAL |
| | | HNHYTQKSLSLSPGGGGGSGGGGSGGGGSEEDPCACES |
| | | LVKFQAKVEGLLQALTRKLEAVSKRLAILENTVV |
| 673 | Construct 15 | DVVMTQSPPSLLVTLGQPASISCRSSQSLLHSSGNTYLN |
| | Light Chain | WLLQRPGQSPQPLIYLVSKLESGVPDRFSGSGSGTDFTLK |
| | | ISGVEAEDVGVYYCMQFTHYPYTFGQGTKLEIKRTVAAP |
| | | SVFIFPPSDEQLKSGTASVVCLLNNFYPREAKVQWKVDN |
| | | ALQSGNSQESVTEQDSKDSTYSLSSTLTLSKADYEKHKV |
| | | YACEVTHQGLSSPVTKSFNRGEC |
| 719 | Construct 15 | QVQLVQSGAEVQRPGASVKVSCKASGYIFTEYYMYWV |
| | Heavy Chain 1 | RQAPGQGLELVGRIDPEDGSIDYVEKFKKKVTLTADTSS |
| | | STAYMELSSLTSDDTAVYYCARGKFNYRFAYWGQGTL |
| | | VTVSSASTKGPSVFPLAPSSKSTSGGTAALGCLVKDYFPE |
| | | PVTVSWNSGALTSGVHTFPAVLQSSGLYSLSSVVTVPSS |
| | | SLGTQTYICNVNHKPSNTKVDKRVEPKSCDKTHTCPPCP |
| | | APELLGGPSVFLFPPKPKDTLMISRTPEVTCVVVDVSHED |
| | | PEVKFNWYVDGVEVHNAKTKPREEQYNSTYRVVSVLT |
| | | VLHQDWLNGKEYKCKVSNKALPAPIEKTISKAKGQPREP |
| | | QVCTLPPSREEMTKNQVSLSCAVKGFYPSDIAVEWESNG |
| | | QPENNYKTTPPVLDSDGSFFLVSKLTVDKSRWQQGNVF |
| | | SCSVMHEALHNRFTQKSLSLSPGK |
| 724 | Construct 15 | QVQLVQSGGGVVQPGRSLRLSCKASGYTFTRYTMHWV |
| | Heavy Chain 2 | RQAPGKGLEWIGYINPSRGYTNYNQKVKDRFTISRDNSK |
| | | NTAFLQMDSLRPEDTGVYFCARYYDDHYSLDYWGQGT |
| | | PVTVSSGGGGSGGGGSGGGGSGGGGSDIQMTQSPSSLSA |
| | | SVGDRVTITCSASSSVSYMNWYQQTPGKAPKRWIYDTS |
| | | KLASGVPSRFSGSGSGTDYTFTISSLQPEDIATYYCQQWS |
| | | SNPFTFGQGTKLQITGGGGSDKTHTCPPCPAPELLGGPSV |
| | | FLFPPKPKDTLMISRTPEVTCVVVDVSHEDPEVKFNWYV |
| | | DGVEVHNAKTKPREEQYNSTYRVVSVLTVLHQDWLNG |
| | | KEYKCKVSNKALPAPIEKTISKAKGQPREPQVYTLPPCRE |
| | | EMTKNQVSLWCLVKGFYPSDIAVEWESNGQPENNYKTT |
| | | PPVLDSDGSFFLYSKLTVDKSRWQQGNVFSCSVMHEAL |
| | | HNHYTQKSLSLSPGGGGGSDLGPQMLRELQETNAALQD |
| | | VRELLRQQVREITFLKNTVMECDACGMQQ |
| 518 | Construct 16 | DIQMTQSPSSLSASVGDRVTITCHASQNIYVWLNWYQQ |
| | Light Chain | KPGKAPKLLIYKASNLHTGVPSRFSGSGSGTDFTLTISSL |
| | | QPEDFATYYCQQGQTYPYTFGGGTKVEIKRTVAAPSVFI |
| | | FPPSDEQLKSGTASVVCLLNNFYPREAKVQWKVDNALQ |
| | | SGNSQESVTEQDSKDSTYSLSSTLTLSKADYEKHKVYAC |
| | | EVTHQGLSSPVTKSFNRGEC |
| 721 | Construct 16 | QVQLVQSGAEVKKPGASVKVSCKASGYTFTSYYIHWVR |
| | Heavy Chain 1 | QAPGQGLEWIGCIYPGNVNTNYNEKFKDRATLTVDTSIS |
| | | TAYMELSRLRSDDTAVYFCTRSHYGLDWNFDVWGQGT |
| | | TVTVSSASTKGPSVFPLAPSSKSTSGGTAALGCLVKDYFP |
| | | EPVTVSWNSGALTSGVHTFPAVLQSSGLYSLSSVVTVPS |
| | | SSLGTQTYICNVNHKPSNTKVDKRVEPKSCDKTHTCPPC |
| | | PAPELLGGPSVFLFPPKPKDTLMISRTPEVTCVVVDVSHE |
| | | DPEVKFNWYVDGVEVHNAKTKPREEQYNSTYRVVSVL |
| | | TVLHQDWLNGKEYKCKVSNKALPAPIEKTISKAKGQPR |
| | | EPQVCTLPPSREEMTKNQVSLSCAVKGFYPSDIAVEWES |
| | | NGQPENNYKTTPPVLDSDGSFFLVSKLTVDKSRWQQGN |
| | | VFSCSVMHEALHNRFTQKSLSLSPGK |
| 724 | Construct 16 | QVQLVQSGGGVVQPGRSLRLSCKASGYTFTRYTMHWV |
| | Heavy Chain 2 | RQAPGKGLEWIGYINPSRGYTNYNQKVKDRFTISRDNSK |
| | | NTAFLQMDSLRPEDTGVYFCARYYDDHYSLDYWGQGT |
| | | PVTVSSGGGGSGGGGSGGGGSGGGGSDIQMTQSPSSLSA |
| | | SVGDRVTITCSASSSVSYMNWYQQTPGKAPKRWIYDTS |
| | | KLASGVPSRFSGSGSGTDYTFTISSLQPEDIATYYCQQWS |
| | | SNPFTFGQGTKLQITGGGGSDKTHTCPPCPAPELLGGPSV |
| | | FLFPPKPKDTLMISRTPEVTCVVVDVSHEDPEVKFNWYV |
| | | DGVEVHNAKTKPREEQYNSTYRVVSVLTVLHQDWLNG |
| | | KEYKCKVSNKALPAPIEKTISKAKGQPREPQVYTLPPCRE |
| | | EMTKNQVSLWCLVKGFYPSDIAVEWESNGQPENNYKTT |
| | | PPVLDSDGSFFLYSKLTVDKSRWQQGNVFSCSVMHEAL |
| | | HNHYTQKSLSLSPGGGGGSDLGPQMLRELQETNAALQD |
| | | VRELLRQQVREITFLKNTVMECDACGMQQ |
| 722 | Construct 17 | DKTHTCPPCPAPELLGGPSVFLFPPKPKDTLMISRTPEVT |
| | Heavy Chain 1 | CVVVDVSHEDPEVKFNWYVDGVEVHNAKTKPREEQYN |
| | | STYRVVSVLTVLHQDWLNGKEYKCKVSNKALPAPIEKTI |
| | | SKAKGQPREPQVCTLPPSREEMTKNQVSLSCAVKGFYPS |
| | | DIAVEWESNGQPENNYKTTPPVLDSDGSFFLVSKLTVDK |
| | | SRWQQGNVFSCSVMHEALHNRFTQKSLSLSPGK |
| 724 | Construct 17 | QVQLVQSGGGVVQPGRSLRLSCKASGYTFTRYTMHWV |
| | Heavy Chain 2 | RQAPGKGLEWIGYINPSRGYTNYNQKVKDRFTISRDNSK |
| | | NTAFLQMDSLRPEDTGVYFCARYYDDHYSLDYWGQGT |
| | | PVTVSSGGGGSGGGGSGGGGSGGGGSDIQMTQSPSSLSA |
| | | SVGDRVTITCSASSSVSYMNWYQQTPGKAPKRWIYDTS |
| | | KLASGVPSRFSGSGSGTDYTFTISSLQPEDIATYYCQQWS |
| | | SNPFTFGQGTKLQITGGGGSDKTHTCPPCPAPELLGGPSV |
| | | FLFPPKPKDTLMISRTPEVTCVVVDVSHEDPEVKFNWYV |
| | | DGVEVHNAKTKPREEQYNSTYRVVSVLTVLHQDWLNG |
| | | KEYKCKVSNKALPAPIEKTISKAKGQPREPQVYTLPPCRE |
| | | EMTKNQVSLWCLVKGFYPSDIAVEWESNGQPENNYKTT |
| | | PPVLDSDGSFFLYSKLTVDKSRWQQGNVFSCSVMHEAL |
| | | HNHYTQKSLSLSPGGGGGSDLGPQMLRELQETNAALQD |
| | | VRELLRQQVREITFLKNTVMECDACGMQQ |
| SEQ ID | Anti-CD3 | QVQLVESGGGLVQPGGSLRLSCAASGFTFSTYGMSWVR |
| NO: 726 | (4)/anti-CD28 | QAPGKGLEWVSSIFYTGSSTYYADSVKGRFTISRDNSKN |
| | (2) bispecific | TLYLQMNSLRAEDTAVYYCARIGYAGDSKYAIWGQGTL |
| | heavy chain | VTVSSASTKGPSVFPLAPSSKSTSGGTAALGCLVKDYFPE |
| | | PVTVSWNSGALTSGVHTFPAVLQSSGLYSLSSVVTVPSS |
| | | SLGTQTYICNVNHKPSNTKVDKRVEPKSCDKTHTCPPCP |
| | | APEAAGGPSVFLFPPKPKDTLMISRTPEVTCVVVDVKHE |
| | | DPEVKFNWYVDGVEVHNAKTKPREEQYNSTYRVVSVL |
| | | TVLHQDWLNGKEYKCKVSNKALAAPIEKTISKAKGQPR |
| | | EPQVYTLPPSREEMTKNQVSLTCLVKGFYPSDIAVEWES |
| | | NGQPENNYKTTPPVLDSDGSFFLYSKLTVDKSRWQQGN |
| | | VFSCSVMHEALHNHYTQKSLSLSPGGGGGSGGGGSGGG |
| | | GSGGGGSEVKLVESGGDLVQPGDSLTLSCVASGFTFSKQ |
| | | GMHWIRQAPKKGLEWIAMIYYDSSKMYYADTVKGRFTI |
| | | SRDNSKNTLYLEMNSLRSEDTAMYYCASFWWDLDFDH |
| | | WGQGVMVTVSSGGGGSGGGGSGGGGSGGGGSDILVTQ |
| | | TPVSLPVSLGGHVSISCRSSQSLVRSEGTTYFNWYLQKPG |
| | | QSPQLLIYRVSNRFSGVPDRFSGSGSGTDFTLKISRVEPED |
| | | LGVYYCLQSSHFPWTFGGGTKLELK |
| SEQ ID | Anti-CD3 | EVQLVESGGGLVQPGGSLRLSCAASGFTFSTYGMSWVR |
| NO: 1416 | (4)/anti-CD28 | QAPGKGLEWVSSIFYTGSSTYYADSVKGRFTISRDNSKN |
| | (2) bispecific | TLYLQMNSLRAEDTAVYYCARIGYAGDSKYAIWGQGTL |
| | alternative | VTVSSASTKGPSVFPLAPSSKSTSGGTAALGCLVKDYFPE |
| | heavy chain | PVTVSWNSGALTSGVHTFPAVLQSSGLYSLSSVVTVPSS |
| | | SLGTQTYICNVNHKPSNTKVDKRVEPKSCDKTHTCPPCP |
| | | APEAAGGPSVFLFPPKPKDTLMISRTPEVTCVVVDVKHE |
| | | DPEVKFNWYVDGVEVHNAKTKPREEQYNSTYRVVSVL |
| | | TVLHQDWLNGKEYKCKVSNKALAAPIEKTISKAKGQPR |
| | | EPQVYTLPPSREEMTKNQVSLTCLVKGFYPSDIAVEWES |
| | | NGQPENNYKTTPPVLDSDGSFFLYSKLTVDKSRWQQGN |
| | | VFSCSVMHEALHNHYTQKSLSLSPGGGGGSGGGGSGGG |
| | | GSGGGGSEVKLVESGGDLVQPGDSLTLSCVASGFTFSKQ |
| | | GMHWIRQAPKKGLEWIAMIYYDSSKMYYADTVKGRFTI |
| | | SRDNSKNTLYLEMNSLRSEDTAMYYCASFWWDLDFDH |
| | | WGQGVMVTVSSGGGGSGGGGSGGGGSGGGGSDILVTQ |
| | | TPVSLPVSLGGHVSISCRSSQSLVRSEGTTYFNWYLQKPG |
| | | QSPQLLIYRVSNRFSGVPDRFSGSGSGTDFTLKISRVEPED |
| | | LGVYYCLQSSHFPWTFGGGTKLELK |
| SEQ ID | Anti-CD3 | DIVLTQPPSVSGAPGQRVTISCSGSSSNIVSNYVNWYQQL |
| NO: 728 | (4)/anti-CD28 | PGTAPKLLIYDNNKRPSGVPDRFSGSKSGTSASLAITGLQ |
| | (2) bispecific | SEDEADYYCQSYAIGSYSVVFGGGTKLTVLGQGTKVEIK |
| | light chain 1 | RTVAAPSVFIFPPSDEQLKSGTASVVCLLNNFYPREAKV |
| | | QWKVDNALQSGNSQESVTEQDSKDSTYSLSSTLTLSKA |
| | | DYEKHKVYACEVTHQGLSSPVTKSFNRGEC |
| SEQ ID | Anti-CD3 | DIVLTQPPSVSGAPGQRVTISCSGSSSNIVSNYVNWYQQL |
| NO: 730 | (4)/anti-CD28 | PGTAPKLLIYDNNKRPSGVPDRFSGSKSGTSASLAITGLQ |
| | (2) bispecific | SEDEADYYCQSYAIGSYSVVFGGGTKLTVLGQPKAAPSV |
| | light chain 2 | TLFPPSSEELQANKATLVCLISDFYPGAVTVAWKADSSP |
| | | VKAGVETTTPSKQSNNKYAASSYLSLTPEQWKSHRSYS |
| | | CQVTHEGSTVEKTVAPTECS |
| 892 | Anti-CD3 | DIVLTQPPSVSGAPGQRVTISCSGSSSNIVSNYVNWYQQL |
| | (2)/anti-CD28 | PGTAPKLLIYDNNKRPSGVPDRFSGSKSGTSASLAITGLQ |
| | (2) light chain | SEDEADYYCQSYAIGSYSVVFGGGTKLTVLGQGTKVEIK |
| | | RTVAAPSVFIFPPSDEQLKSGTASVVCLLNNFYPREAKV |
| | | QWKVDNALQSGNSQESVTEQDSKDSTYSLSSTLTLSKA |
| | | DYEKHKVYACEVTHQGLSSPVTKSFNRGEC |
| 893 | Anti-CD3 | QVQLVESGGGLVQPGGSLRLSCAASGFTFSTYGMSWVR |
| | (2)/anti-CD28 | QAPGKGLEWVSSIFYTGSSTYYADSVKGRFTISRDNSKN |
| | (2) heavy chain | TLYLQMNSLRAEDTAVYYCARIGYAGDSKYAIWGQGTL |
| | | VTVSSASTKGPSVFPLAPSSKSTSGGTAALGCLVKDYFPE |
| | | PVTVSWNSGALTSGVHTFPAVLQSSGLYSLSSVVTVPSS |
| | | SLGTQTYICNVNHKPSNTKVDKRVEPKSCDKTHTCPPCP |
| | | APEAAGGPSVFLFPPKPKDTLMISRTPEVTCVVVDVKHE |
| | | DPEVKFNWYVDGVEVHNAKTKPREEQYNSTYRVVSVL |
| | | TVLHQDWLNGKEYKCKVSNKALAAPIEKTISKAKGQPR |
| | | EPQVYTLPPSREEMTKNQVSLTCLVKGFYPSDIAVEWES |
| | | NGQPENNYKTTPPVLDSDGSFFLYSKLTVDKSRWQQGN |
| | | VFSCSVMHEALHNHYTQKSLSLSPGGGGGSGGGGSGGG |
| | | GSGGGGSEVQLVESGGGLVQPGGSLKLSCAASGFTFNK |
| | | YAMNWVRQAPGKCLEWVARIRSKYNNYATYYADSVK |
| | | DRFTISRDDSKNTAYLQMNNLKTEDTAVYYCVRHGNFG |
| | | NSYISYWAYWGQGTLVTVSSGGGGSGGGGSGGGGSGG |
| | | GGSQTVVTQEPSLTVSPGGTVTLTCGSSTGAVTSGNYPN |
| | | WVQQKPGQAPRGLIGGTKFLAPGTPARFSGSLLGGKAA |
| | | LTLSGVQPEDEAEYYCVLWYSNRWVFGCGTKLTVL |
| SEQ ID | Anti-CD3 | EVQLVESGGGLVQPGGSLRLSCAASGFTFSTYGMSWVR |
| NO: 1417 | (2)/anti-CD28 | QAPGKGLEWVSSIFYTGSSTYYADSVKGRFTISRDNSKN |
| | (2) alternative | TLYLQMNSLRAEDTAVYYCARIGYAGDSKYAIWGQGTL |
| | heavy chain | VTVSSASTKGPSVFPLAPSSKSTSGGTAALGCLVKDYFPE |
| | | PVTVSWNSGALTSGVHTFPAVLQSSGLYSLSSVVTVPSS |
| | | SLGTQTYICNVNHKPSNTKVDKRVEPKSCDKTHTCPPCP |
| | | APEAAGGPSVFLFPPKPKDTLMISRTPEVTCVVVDVKHE |
| | | DPEVKFNWYVDGVEVHNAKTKPREEQYNSTYRVVSVL |
| | | TVLHQDWLNGKEYKCKVSNKALAAPIEKTISKAKGQPR |
| | | EPQVYTLPPSREEMTKNQVSLTCLVKGFYPSDIAVEWES |
| | | NGQPENNYKTTPPVLDSDGSFFLYSKLTVDKSRWQQGN |
| | | VFSCSVMHEALHNHYTQKSLSLSPGGGGGSGGGGSGGG |
| | | GSGGGGSEVQLVESGGGLVQPGGSLKLSCAASGFTFNK |
| | | YAMNWVRQAPGKCLEWVARIRSKYNNYATYYADSVK |
| | | DRFTISRDDSKNTAYLQMNNLKTEDTAVYYCVRHGNFG |
| | | NSYISYWAYWGQGTLVTVSSGGGGSGGGGSGGGGSGG |
| | | GGSQTVVTQEPSLTVSPGGTVTLTCGSSTGAVTSGNYPN |
| | | WVQQKPGQAPRGLIGGTKFLAPGTPARFSGSLLGGKAA |
| | | LTLSGVQPEDEAEYYCVLWYSNRWVFGCGTKLTVL |
| 894 | Anti-CD3 | DIQMTQSPSSLSASVGDRVTITCHASQNIYVWLNWYQQ |
| | (4)/anti-CD28 | KPGKAPKLLIYKASNLHTGVPSRFSGSGSGTDFTLTISSL |
| | (1) light chain | QPEDFATYYCQQGQTYPYTFGGGTKVEIKRTVAAPSVFI |
| | | FPPSDEQLKSGTASVVCLLNNFYPREAKVQWKVDNALQ |
| | | SGNSQESVTEQDSKDSTYSLSSTLTLSKADYEKHKVYAC |
| | | EVTHQGLSSPVTKSFNRGEC |
| 895 | Anti-CD3 | QVQLVQSGAEVKKPGASVKVSCKASGYTFTSYYIHWVR |
| | (4)/anti-CD28 | QAPGQGLEWIGCIYPGNVNTNYNEKFKDRATLTVDTSIS |
| | (1) heavy chain | TAYMELSRLRSDDTAVYFCTRSHYGLDWNFDVWGQGT |
| | | TVTVSSASTKGPSVFPLAPSSKSTSGGTAALGCLVKDYFP |
| | | EPVTVSWNSGALTSGVHTFPAVLQSSGLYSLSSVVTVPS |
| | | SSLGTQTYICNVNHKPSNTKVDKRVEPKSCDKTHTCPPC |
| | | PAPEAAGGPSVFLFPPKPKDTLMISRTPEVTCVVVDVKH |
| | | EDPEVKFNWYVDGVEVHNAKTKPREEQYNSTYRVVSV |
| | | LTVLHQDWLNGKEYKCKVSNKALAAPIEKTISKAKGQP |
| | | REPQVYTLPPSREEMTKNQVSLTCLVKGFYPSDIAVEWE |
| | | SNGQPENNYKTTPPVLDSDGSFFLYSKLTVDKSRWQQG |
| | | NVFSCSVMHEALHNHYTQKSLSLSPGGGSEVKLVESGG |
| | | DLVQPGDSLTLSCVASGFTFSKQGMHWIRQAPKKGLEW |
| | | IAMIYYDSSKMYYADTVKGRFTISRDNSKNTLYLEMNSL |
| | | RSEDTAMYYCASFWWDLDFDHWGQGVMVTVSSGGGG |
| | | SGGGGSGGGGSGGGGSDILVTQTPVSLPVSLGGHVSISC |
| | | RSSQSLVRSEGTTYFNWYLQKPGQSPQLLIYRVSNRFSG |
| | | VPDRFSGSGSGTDFTLKISRVEPEDLGVYYCLQSSHFPWT |
| | | FGGGTKLELK |

[0559] In some embodiments, the multispecific binding molecule comprises a bispecific antibody. In some embodiments, the bispecific antibody is configured in any one of the schema provided in FIGS. 37A-37B, FIG. 48A-48B, FIG. 49A-49C,and FIG. 50A-50B. In some embodiments, the bispecific antibody is monovalent or bivalent. In some embodiments, the bispecific antibody comprises an Fc region. In some embodiments, the Fc region of the bispecific antibody is silenced.

[0560] In some embodiments, the multispecific binding molecule comprises a plurality of bispecific antibodies. In some embodiments, one or more of the plurality of bispecific antibodies is monovalent. In some embodiments, one or more of the plurality of bispecific antibodies comprises an Fc region. In some embodiments, the Fc region of the one or more of the plurality of bispecific antibodies is silenced. In some embodiments, one or more of the plurality of bispecific antibodies are conjugated together into a multimer. In some embodiments, the multimer is configured in any one of the multispecific schema provided in FIG. 37B and FIG. 48B.

[0561] In some embodiments, a multispecific binding molecule described herein comprises an Fc region, e.g., wherein the Fc region is Fc silent. In some embodiments, the Fc region comprises a mutation at one or more of (e.g., all of) D265, N297, and P329, numbered according to the Eu numbering system. In some embodiments, the Fc region comprises the mutations D265A, N297A, and P329A (DANAPA), numbered according to the Eu numbering system.

[0562] In some embodiments, a multispecific binding molecule described herein comprises a first binding domain and a second binding domain. For instance, the first binding domain may be an anti-CD3 binding domain and the second binding domain may be a costimulatory molecule binding domain, or the first binding domain may be a costimulatory molecule binding domain and the second binding domain may be an anti-CD3 binding domain. In some embodiments, the costimulatory molecule binding domain binds to CD2, CD28, CD25, CD27, IL6Rb, ICOS, or 41BB. In some embodiments, the costimulatory molecule binding domain activates CD2, CD28, CD25, CD27, IL6Rb, ICOS, or 41BB. In some embodiments, a multispecific binding molecule described herein comprises an Fc region that is mutated to have reduced binding to Fc receptor or reduced ADCC, ADCP, or CDC activity, e.g., an Fc region comprising the mutations D265A, N297A, and P329A (DANAPA), numbered according to the Eu numbering system.

[0563] In some embodiments, the first binding domain (e.g., an scFv) is N-terminal of the VH of the second binding domain (e.g., a Fab fragment), e.g., linked via a peptide linker. In some embodiments, the multispecific binding molecule further comprises one or more of (e.g., all of) a CH1, CH2, and CH3, e.g., in order from N-terminal to C-terminal. In some embodiments, a polypeptide of the multispecific binding molecule comprises the following sequences, from N-terminal to C-terminal: VH of the first binding domain, first peptide linker (e.g., a (G4S)4 linker (SEQ ID NO: 29)), VL of first binding domain, second peptide linker (e.g., a (G4S)4 linker (SEQ ID NO: 29)), VH of the second binding domain, CH1, CH2, and CH3. In some embodiments, a polypeptide of the multispecific binding molecule comprises the following sequences: from N-terminal to C-terminal: VL of the second binding domain and CL. In some embodiments, the multispecific binding molecule comprises an Fc region that is mutated to have reduced binding to Fc receptor or reduced ADCC, ADCP, or CDC activity, e.g., an Fc region comprising the mutations D265A, N297A, and P329A (DANAPA), numbered according to the Eu numbering system. In some embodiments, the first binding fragment comprises an anti-CD3 binding domain, e.g., an anti-CD3 scFv, e.g., comprising an anti-CD3 sequence disclosed in Table 19. In some embodiments, the second binding domain comprises a costimulatory molecule binding domain, e.g., an anti-CD2 binding domain, e.g., an anti-CD2 Fab, e.g., comprising an anti-CD2 sequence disclosed in Table 19. In some embodiments, the second binding domain comprises a costimulatory molecule binding domain, e.g., an anti-CD28 binding domain, e.g., an anti-CD28 Fab, e.g., comprising an anti-CD28 sequence disclosed in Table 19. In some embodiments, the first binding fragment comprises a costimulatory molecule binding domain, e.g., an anti-CD2 or anti-CD28 binding domain, e.g., an anti-CD2 or anti-CD28 scFv, e.g., comprising an anti-CD2 or anti-CD28 sequence disclosed in Table 19. In some embodiments, the second binding domain comprises an anti-CD3 binding domain, e.g., an anti-CD3 Fab, e.g., comprising an anti-CD3 sequence disclosed in Table 19. Examples of such multispecific binding molecules are depicted as the top left construct in FIG. 37A; Construct 1 or Construct 2 in FIG. 48A; and Construct 1 or Construct 2 in Table 20.

[0564] In some embodiments, the first binding domain (e.g., a Fab fragment) is N-terminal to a second binding domain (e.g., an scFv), e.g., wherein an Fc region is situated between the first and second binding domain. In some embodiments, the Fc region is mutated to have reduced binding to Fc receptor or reduced ADCC, ADCP, or CDC activity, e.g., an Fc region comprising the mutations D265A, N297A, and P329A (DANAPA), numbered according to the Eu numbering system. In some embodiments the Fc region is comprises the mutations L234A, L235A, S267K, and P329A (LALASKPA), numbered according to the Eu numbering system. In some embodiments, the Fc region comprises the mutations L234A, L235A, and P329G (LALAPG), numbered according to the Eu numbering system. In some embodiments, the Fc region comprises the mutations G237A, D265A, P329A, and S267K (GADAPASK), numbered according to the Eu numbering system. In some embodiments, the multispecific binding molecule further comprises one or more of (e.g., all of) a CH1, CH2, and CH3, e.g., in order from N-terminal to C-terminal. In some embodiments, a polypeptide of the multispecific binding molecule comprises the following sequences, from N-terminal to C-terminal: VH of the first binding domain, CH1, CH2, CH3, first peptide linker (e.g., a (G4S)4 linker (SEQ ID NO: 29)), VH of second binding domain, second peptide linker (e.g., a (G4S)4 linker (SEQ ID NO: 29)), and VL of the second binding domain. In some embodiments, a polypeptide of the multispecific binding molecule comprises the following sequences: from N-terminal to C-terminal: VL of the first binding domain and CL. In some embodiments, the first binding domain comprises a costimulatory molecule binding domain, e.g., an anti-CD2 binding domain, e.g., an anti-CD2 Fab, e.g., comprising an anti-CD2 sequence disclosed in Table 19. In some embodiments, the first binding domain comprises a costimulatory molecule binding domain, e.g., an anti-CD28 binding domain, e.g., an anti-CD28 Fab, e.g., comprising an anti-CD28 sequence disclosed in Table 19, e.g., anti-CD28 (1) or anti-CD28 (2). In some embodiments, the second binding domain comprises an anti-CD3 binding domain, e.g., an anti-CD3 scFv, e.g., comprising an anti-CD3 sequence disclosed in Table 19, e.g., anti-CD3 (1), anti-CD3 (2), anti-CD3 (3), or anti-CD3 (4). In some embodiments, the first binding domain comprises an anti-CD3 binding domain, e.g., an anti-CD3 Fab, e.g., comprising an anti-CD3 sequence disclosed in Table 19, e.g., anti-CD3 (1), anti-CD3 (2), anti-CD3 (3), or anti-CD3 (4). In some embodiments, the second binding domain comprises a costimulatory molecule binding domain, e.g., an anti-CD2 or anti-CD28 binding domain, e.g., an anti-CD2 or anti-CD28 scFv, e.g., comprising an anti-CD2 or anti-CD28 sequence disclosed in Table 19. Examples of such multispecific binding molecules are depicted as the second construct from the left in the top row of FIG. 37A; Construct 3 or Construct 4 in FIG. 48A; and Construct 3 or Construct 4 in Table 20. In some embodiments, the first binding domain (e.g., a Fab fragment) is N terminal to a second binding domain (e.g., a scFv), e.g., via a peptide linker. In some embodiments, the multispecific binding molecule further comprises one or more of (e.g., all of) a CH1, CH2, and CH3, e.g., in order from N-terminal to C-terminal. In some embodiments, a polypeptide of the multispecific binding molecule comprises the following sequences, from N-terminal to C-terminal: VH of the first binding domain, CH1, first peptide linker (e.g., a (G4S)2 linker (SEQ ID NO: 767)), VH of the second binding domain, second peptide linker (e.g., a (G4S)4 linker (SEQ ID NO: 29)), VL of the second binding domain, third peptide linker (e.g., a (G4S)4 linker (SEQ ID NO: 29)), CH2, and CH3. In some embodiments, a polypeptide of the multispecific binding molecule comprises the following sequences: from N-terminal to C-terminal: VL of the first binding domain and CL. In some embodiments, the multispecific binding molecule comprises an Fc region that is mutated to have reduced binding to Fc receptor or reduced ADCC, ADCP, or CDC activity, e.g., an Fc region comprising the mutations D265A, N297A, and P329A (DANAPA), numbered according to the Eu numbering system. In some embodiments, the first binding domain comprises a costimulatory molecule binding domain, e.g., an anti-CD2 binding domain, e.g., an anti-CD2 Fab, e.g., comprising an anti-CD2 sequence disclosed in Table 19. In some embodiments, the first binding domain comprises a costimulatory molecule binding domain, e.g., an anti-CD28 binding domain, e.g., an anti-CD28 Fab, e.g., comprising an anti-CD28 sequence disclosed in Table 19, e.g., anti-CD28 (1) or anti-CD28 (2). In some embodiments, the first binding domain comprises a costimulatory molecule binding domain, e.g., an anti-CD25 binding domain (for example, an anti-CD25 Fab), an anti-CD27 binding domain (for example, an anti-CD27 Fab), an anti-IL6Rb binding domain (for example, an anti-TL6Rb Fab), an anti-ICOS binding domain (for example, an anti-ICOS Fab), or an anti-41BB binding domain (for example, an anti-41BB Fab). In some embodiments, the second binding domain comprises an anti-CD3 binding domain, e.g., an anti-CD3 scFv, e.g., comprising an anti-CD3 sequence disclosed in Table 19, e.g., anti-CD3 (1), anti-CD3 (2), anti-CD3 (3), or anti-CD3 (4). In some embodiments, the first binding domain comprises an anti-CD3 binding domain, e.g., an anti-CD3 Fab, e.g., comprising an anti-CD3 sequence disclosed in Table 19, e.g., anti-CD3 (1), anti-CD3 (2), anti-CD3 (3), or anti-CD3 (4). In some embodiments, the second binding domain comprises a costimulatory molecule binding domain, e.g., an anti-CD2 binding domain (for example, an anti-CD2 scFv), an anti-CD28 binding domain (for example, an anti-CD28 scFv), an anti-CD25 binding domain (for example, an anti-CD25 scFv), an anti-CD27 binding domain (for example, an anti-CD27 scFv), an anti-IL6Rb binding domain (for example, an anti-TL6Rb scFv), an anti-ICOS binding domain (for example, an anti-ICOS scFv), or an anti-41BB binding domain (for example, an anti-41BB scFv). Examples of such multispecific binding molecules are depicted as the third construct from the left in the top row of FIG. 37A; Construct 5 or Construct 6 in FIG. 48A; and Construct 5 or Construct 6 in Table 20.

[0565] In some embodiments, the first binding domain (e.g., an scFv) is N-terminal to a second binding domain (e.g., a Fab fragment), e.g., wherein an Fc region is situated between the first and second binding domain. In some embodiments, the Fc region is mutated to have reduced binding to Fc receptor or reduced ADCC, ADCP, or CDC activity, e.g., an Fc region comprising the mutations D265A, N297A, and P329A (DANAPA), numbered according to the Eu numbering system. In some embodiments, the multispecific binding molecule further comprises one or more of (e.g., all of) a CH2, CH3, and CH1, e.g., in order from N-terminal to C-terminal. In some embodiments, a polypeptide of the multispecific binding molecule comprises the following sequences, from N-terminal to C-terminal: VH of the first binding domain, first peptide linker (e.g., a (G4S)4 linker) (SEQ ID NO: 29), VL of the first binding domain, second peptide linker (e.g., a (G4S) linker (SEQ ID NO: 768)), CH2, CH3, third peptide linker (e.g., a (G4S)4 linker (SEQ ID NO: 29)), VH of the second binding domain, and CH1. In some embodiments, a polypeptide of the multispecific binding molecule comprises the following sequences: from N-terminal to C-terminal: VL of the second binding domain and CL. In some embodiments, the first binding domain comprises an anti-CD3 binding domain, e.g., an anti-CD3 scFv, e.g., comprising an anti-CD3 sequence disclosed in Table 19. In some embodiments, the second binding domain comprises a costimulatory molecule binding domain, e.g., an anti-CD2 binding domain, e.g., an anti-CD2 Fab, e.g., comprising an anti-CD2 sequence disclosed in Table 19. In some embodiments, the second binding domain comprises a costimulatory molecule binding domain, e.g., an anti-CD28 binding domain, e.g., an anti-CD28 Fab, e.g., comprising an anti-CD28 sequence disclosed in Table 19. In some embodiments, the first binding domain comprises a costimulatory molecule binding domain, e.g., an anti-CD2 or anti-CD28 binding domain, e.g., an anti-CD2 or anti-CD28 scFv, e.g., comprising an anti-CD2 or anti-CD28 sequence disclosed in Table 19. In some embodiments, the second binding domain comprises an anti-CD3 binding domain, e.g., an anti-CD3 Fab, e.g., comprising an anti-CD3 sequence disclosed in Table 19. Examples of such multispecific binding molecules are depicted as the rightmost construct in the top row of FIG. 37A; Construct 7 or Construct 8 in FIG. 48A; and Construct 7 or Construct 8 in Table 20.

[0566] In some embodiments, the first binding domain (e.g., a Fab fragment) is situated N terminal to a first Fc region. In some embodiments, the multispecific binding molecule comprises one or more of (e.g., all of) a first CH1, a first CH2, and a first CH3, e.g., in order from N-terminal to C-terminal. In some embodiments, the second binding domain (e.g., an scFv) is situated N terminal to a second Fc region, e.g., in a second polypeptide chain. In some embodiments, the multispecific binding molecule comprises, e.g., in the second polypeptide chain, one or more of (e.g., both of) a second CH2 and a second CH3, e.g., in order from N-terminal to C-terminal. In some embodiments, the multispecific binding molecule comprises a heterodimeric antibody molecule, such as for instance, wherein the first and second Fc regions comprise knob-into-hole mutations. In some embodiments, the first Fc region binds the second Fc region more strongly than the first Fc region binds another copy of the first Fc region. In some embodiments, a first polypeptide of the multispecific binding molecule comprises the following sequences, from N-terminal to C-terminal: VH of the first binding domain, a first CH1, a first CH2, and a first CH3. In some embodiments, a second polypeptide of the multispecific binding molecule comprises the following sequences, from N-terminal to C-terminal: VH of the second binding domain, a first peptide linker (e.g., a (G4S) linker (SEQ ID NO: 768)), VL of the second binding domain, a second CH2, and a second CH3. In some embodiments, a third polypeptide of the multispecific binding molecule comprises the following sequences: from N-terminal to C-terminal: VL of the first binding domain and CL. In some embodiments, the second polypeptide of the multispecific binding molecule further comprises a homomultimerization domain, e.g., a Matrilin1 protein or the coiled-coil domain of cartilage oligomeric matrix protein (COMPcc), C-terminal to the second CH3, e.g., via a peptide linker (e.g., a (G4S)4 linker (SEQ ID NO: 29), a (G4S) linker (SEQ ID NO: 768), or a (G4S)3 linker (SEQ ID NO: 30)). In some embodiments, the multispecific binding molecule comprises two, three, four, or five copies of the first binding domain and the same number of copies of the second binding domain, e.g., as depicted in FIG. 37B. In some embodiments, the first binding domain comprises a costimulatory molecule binding domain, e.g., an anti-CD2 binding domain (for example, an anti-CD2 Fab). In some embodiments, the first binding domain comprises a costimulatory molecule binding domain, e.g., an anti-CD28 binding domain (for example, an anti-CD28 Fab). In some embodiments, the second binding domain comprises an anti-CD3 binding domain, e.g., an anti-CD3 scFv. Examples of such multispecific binding molecules are depicted as the leftmost construct in the bottom row of FIG. 37A; constructs in FIG. 37B, Construct 9, Construct 10, Construct 12, Construct 13, Construct 15, and Construct 16 in FIG. 48B; and Construct 9, Construct 10, Construct 12, Construct 13, Construct 15, and Construct 16 in Table 20.

[0567] In some embodiments, a binding molecule described herein comprises a binding domain. In some embodiments the binding domain (e.g., an scFv) is situated N terminal to an Fc region. In some embodiments, the binding molecule comprises a heterodimeric antibody molecule, such as for instance, wherein the first and second Fc regions comprise knob-into-hole mutations. In some embodiments, the first Fc region binds the second Fc region more strongly than the first Fc region binds another copy of the first Fc region. In some embodiments, the binding molecule comprises one or more of (e.g., all of) a CH2 and a CH3, e.g., in order from N-terminal to C-terminal. In some embodiments, a second polypeptide of the binding molecule comprises the following sequences, from N-terminal to C-terminal: VH of the binding domain, first peptide linker (e.g., a (G4S)4 linker (SEQ ID NO: 29)), VL of the binding domain, second peptide linker (e.g., (G4S)4 linker (SEQ ID NO: 29) or (G4S) linker (SEQ ID NO: 768)), CH2, and CH3. In some embodiments, the second polypeptide of the binding molecule further comprises a homomultimerization domain, e.g., a Matrilin1 protein or the coiled-coil domain of cartilage oligomeric matrix protein (COMPcc), C-terminal to the second CH3, e.g., via a peptide linker (e.g., (G4S)4 linker (SEQ ID NO: 29), (GS4)3 linker (SEQ ID NO: 878), or (G4S) linker (SEQ ID NO: 768)). In some embodiments, the binding molecule comprises two, three, four, or five copies of the binding, e.g., as depicted in FIG. 37B. In some embodiments, the binding domain comprises an anti-CD3 binding domain, e.g., an anti-CD3 scFv. In some embodiments, a costimulatory molecule binding domain is absent. Examples of such binding molecules are depicted as the rightmost construct in the bottom row of FIG. 37A; Construct 11, Construct 14, and Construct 17 in FIG. 48B; and Construct 11, Construct 14, and Construct 17 in Table 20.

[0568] In some embodiments, the multispecific binding protein comprises an anti-CD28 binding domain, e.g., an anti-CD28 Fab, e.g., comprising an anti-CD28 (2) sequence of Table 19 (or a sequence having at least 70%, 75%, 80%, 85%, 90%, 95%, 96%, 97%, 98%, or 99% sequence identity thereto), and an anti-CD3 scFv, e.g., comprising an anti-CD3 (4) sequence of Table 19 (or a sequence having at least 70%, 75%, 80%, 85%, 90%, 95%, 96%, 97%, 98%, or 99% sequence identity thereto). In some embodiments, the multispecific binding protein comprises an Fc region, wherein the anti-CD28 Fab is fused to the Fc region, which is further fused to the anti-CD3 scFv. In some embodiments, the Fc region comprises L234A, L235A, S267K, and P329A mutations (LALASKPA), numbered according to the Eu numbering system. In some embodiments, the multispecific binding protein comprises a heavy chain comprising the amino acid sequence of SEQ ID NO: 726 or 1416, or an amino acid sequence at least 70%, 75%, 80%, 85%, 90%, 95%, 96%, 97%, 98%, or 99% identical to SEQ ID NO: 726 or 1416. In some embodiments, the multispecific binding protein comprises a light chain comprising the amino acid sequence of SEQ ID NO: 728 or 730, or an amino acid sequence at least 70%, 75%, 80%, 85%, 90%, 95%, 96%, 97%, 98%, or 99% identical to SEQ ID NO: 728 or 730. In some embodiments, the multispecific binding protein comprises a heavy chain comprising the amino acid sequence of SEQ ID NO: 726 or 1416, or an amino acid sequence at least 70%, 75%, 80%, 85%, 90%, 95%, 96%, 97%, 98%, or 99% identical to SEQ ID NO: 726 or 1416, and a light chain comprising the amino acid sequence of SEQ ID NO: 728 or 730, or an amino acid sequence at least 70%, 75%, 80%, 85%, 90%, 95%, 96%, 97%, 98%, or 99% identical to SEQ ID NO: 728 or 730. In some embodiments, the multispecific binding protein comprises a heavy chain comprising the amino acid sequence of SEQ ID NO: 726, or an amino acid sequence at least 70%, 75%, 80%, 85%, 90%, 95%, 96%, 97%, 98%, or 99% identical thereto, and a light chain comprising the amino acid sequence of SEQ ID NO: 728, or an amino acid sequence at least 70%, 75%, 80%, 85%, 90%, 95%, 96%, 97%, 98%, or 99% identical thereto. In some embodiments, the multispecific binding protein comprises a heavy chain comprising the amino acid sequence of SEQ ID NO: 726, or an amino acid sequence at least 70%, 75%, 80%, 85%, 90%, 95%, 96%, 97%, 98%, or 99% identical thereto, and a light chain comprising the amino acid sequence of SEQ ID NO: 730, or an amino acid sequence at least 70%, 75%, 80%, 85%, 90%, 95%, 96%, 97%, 98%, or 99% identical thereto. In some embodiments, the multispecific binding protein comprises a heavy chain comprising the amino acid sequence of SEQ ID NO: 1416, or an amino acid sequence at least 70%, 75%, 80%, 85%, 90%, 95%, 96%, 97%, 98%, or 99% identical thereto, and a light chain comprising the amino acid sequence of SEQ ID NO: 728, or an amino acid sequence at least 70%, 75%, 80%, 85%, 90%, 95%, 96%, 97%, 98%, or 99% identical thereto. In some embodiments, the multispecific binding protein comprises a heavy chain comprising the amino acid sequence of SEQ ID NO: 1416, or an amino acid sequence at least 70%, 75%, 80%, 85%, 90%, 95%, 96%, 97%, 98%, or 99% identical thereto, and a light chain comprising the amino acid sequence of SEQ ID NO: 730, or an amino acid sequence at least 70%, 75%, 80%, 85%, 90%, 95%, 96%, 97%, 98%, or 99% identical thereto.

[0569] In some embodiments, the multispecific binding protein comprises an anti-CD28 binding domain, e.g., an anti-CD28 Fab, e.g., comprising an anti-CD28 (2) sequence of Table 19 (or a sequence having at least 70%, 75%, 80%, 85%, 90%, 95%, 96%, 97%, 98%, or 99% sequence identity thereto), and an anti-CD3 scFv, e.g., comprising an anti-CD3 (2) sequence of Table 19 (or a sequence having at least 70%, 75%, 80%, 85%, 90%, 95%, 96%, 97%, 98%, or 99% sequence identity thereto). In some embodiments, the multispecific binding protein comprises an Fc region, wherein the anti-CD28 Fab is fused to the Fc region, which is further fused to the anti-CD3 scFv. In some embodiments, the Fc region comprises L234A, L235A, S267K, and P329A mutations (LALASKPA), numbered according to the Eu numbering system, numbered according to the Eu numbering system. In some embodiments, the multispecific binding protein comprises a heavy chain comprising the amino acid sequence of SEQ ID NO: 893 or 1417, or an amino acid sequence at least 70%, 75%, 80%, 85%, 90%, 95%, 96%, 97%, 98%, or 99% identical to SEQ ID NO: 893 or 1417. In some embodiments, the multispecific binding protein comprises a light chain comprising the amino acid sequence of SEQ ID NO: 892, or an amino acid sequence at least 70%, 75%, 80%, 85%, 90%, 95%, 96%, 97%, 98%, or 99% identical thereto. In some embodiments, the multispecific binding protein comprises a heavy chain comprising the amino acid sequence of SEQ ID NO: 893, or an amino acid sequence at least 70%, 75%, 80%, 85%, 90%, 95%, 96%, 97%, 98%, or 99% identical thereto, and a light chain comprising the amino acid sequence of SEQ ID NO: 892, or an amino acid sequence at least 70%, 75%, 80%, 85%, 90%, 95%, 96%, 97%, 98%, or 99% identical thereto. In some embodiments, the multispecific binding protein comprises a heavy chain comprising the amino acid sequence of SEQ ID NO: 1417, or an amino acid sequence at least 70%, 75%, 80%, 85%, 90%, 95%, 96%, 97%, 98%, or 99% identical thereto, and a light chain comprising the amino acid sequence of SEQ ID NO: 892, or an amino acid sequence at least 70%, 75%, 80%, 85%, 90%, 95%, 96%, 97%, 98%, or 99% identical thereto.

[0570] In some embodiments, the multispecific binding protein comprises an anti-CD28 binding domain, e.g., an anti-CD28 Fab, e.g., comprising an anti-CD28 (1) sequence of Table 19 (or a sequence having at least 70%, 75%, 80%, 85%, 90%, 95%, 96%, 97%, 98%, or 99% sequence identity thereto) and an anti-CD3 scFv, e.g., comprising an anti-CD3 (4) sequence of Table 19 (or a sequence having at least 70%, 75%, 80%, 85%, 90%, 95%, 96%, 97%, 98%, or 99% sequence identity thereto). In some embodiments, the multispecific binding protein comprises an Fc region, wherein the anti-CD28 Fab is fused to the Fc region, which is further fused to the anti-CD3 scFv. In some embodiments, the Fc region comprises L234A, L235A, S267K, and P329A mutations (LALASKPA), numbered according to the Eu numbering system. In some embodiments, the multispecific binding protein comprises a heavy chain comprising the amino acid sequence of SEQ ID NO: 895, or an amino acid sequence at least 70%, 75%, 80%, 85%, 90%, 95%, 96%, 97%, 98%, or 99% identical thereto. In some embodiments, the multispecific binding protein comprises a light chain comprising the amino acid sequence of SEQ ID NO: 894, or an amino acid sequence at least 70%, 75%, 80%, 85%, 90%, 95%, 96%, 97%, 98%, or 99% identical thereto. In some embodiments, the multispecific binding protein comprises a heavy chain comprising the amino acid sequence of SEQ ID NO: 895, or an amino acid sequence at least 70%, 75%, 80%, 85%, 90%, 95%, 96%, 97%, 98%, or 99% identical thereto, and a light chain comprising the amino acid sequence of SEQ ID NO: 894, or an amino acid sequence at least 70%, 75%, 80%, 85%, 90%, 95%, 96%, 97%, 98%, or 99% identical thereto.

[0571] It is understood that in many of the embodiments herein, a multispecific binding molecule comprises two or more polypeptide chains that are covalently linked to each other, e.g., via a disulfide bridge. However, in some embodiments, the two or more polypeptide chains of the multispecific binding molecule may be noncovalently bound to each other.

[0572] It is also understood that a Fab fragment may be present as part of a larger protein, for instance, a Fab fragment may be fused with CH2 and CH3 and thus be part of full length antibody.

[0573] The multispecific binding molecule comprising an agent that stimulates a CD3/TCR complex and an agent that stimulates a costimulatory molecule and/or growth factor receptor disclosed herein is contemplated for use as a cell activation agent disclosed herein.

### Fc Variants

[0574] In some embodiments, a multispecific binding molecule described herein comprises an Fc region, e.g., as described herein. In some embodiments, the Fc region is a wild type Fc region, e.g., a wild type human Fc region. In some embodiments, the Fc region comprises a variant, e.g., an Fc region comprising an addition, substitution, or deletion of at least one amino acid residue in the Fc region which results in, e.g., reduced or ablated affinity for at least one Fc receptor. In some embodiments, the multispecific binding molecule comprises the amino acid sequence of an Fc region provided in Table 20, or a sequence having at least 70%, 75%, 80%, 85%, 90%, 95%, 96%, 97%, 98%, or 99% sequence identity thereto.

[0575] In some embodiments, the Fc region of an antibody interacts with a number of receptors or ligands including Fc Receptors (e.g., FcγRI, FcγRIIA, FcγRIIIA), the complement protein CIq, and other molecules such as proteins A and G. These interactions promote a variety of effector functions and downstream signaling events including: antibody dependent cell-mediated cytotoxicity (ADCC), Antibody-dependent cellular phagocytosis (ADCP) and complement dependent cytotoxicity (CDC). Non-limiting exemplary Fc regions featuring these and other silencing modifications disclosed herein are provided in Table 20 above.

[0576] In some embodiments, a multispecific binding molecule described herein comprising a variant Fc region has reduced, e.g., ablated, affinity for an Fc receptor, e.g., an Fc receptor described herein. In some embodiments, the reduced affinity is compared to an otherwise similar antibody with a wild type Fc region.

[0577] In some embodiments, a multispecific binding molecule described herein comprising a variant Fc region has one or more of the following properties: (1) reduced effector function (e.g., reduced ADCC, ADCP and/or CDC); (2) reduced binding to one or more Fc receptors; and/or (3) reduced binding to C1q complement. In some embodiments, the reduction in any one, or all of properties (1)-(3) is compared to an otherwise similar antibody with a wildtype Fc region. Exemplary Fc region variants are provided in Table 34 and also disclosed in Saunders 0, (2019) Frontiers in Immunology; vol 10, article1296, the entire contents of which is hereby incorporated by reference.

[0578] In some embodiments, a multispecific binding molecule described herein comprises any one or all, or any combination of Fc region variants, e.g., mutations, disclosed in Table 34. In some embodiments, the Fc region of a multispecific binding molecule described herein is silenced. In some embodiments, the Fc region of a multispecific binding protein described herein is silenced by a combination of amino acid substitutions selected from the group consisting of LALA, DAPA, DANAPA, LALADANAPS, LALAGA, LALASKPA, DAPASK, GADAPA, GADAPASK, LALAPG, and LALAPA (numbered according to the Eu numbering system).

[0579] In some embodiments, a multispecific binding molecule described herein comprises any one or all, or any combination of a mutant comprising a L234, e.g., L234A and/or L235, e.g., L234A mutation (LALA) in the IgG1 Fc amino acid sequence, numbered according to the Eu numbering system; D265, e.g., D265A and/or P329, e.g., P329A (DAPA), numbered according to the Eu numbering system; N297, e.g., N297A, numbered according to the Eu numbering system; DANAPA (D265A, N297A, and P329A), numbered according to the Eu numbering system; and/or L234, e.g. L234A, L235, e.g., L235A, D265, e.g., D265A, N297, e.g., N297A, and P331, e.g., P331S (LALADANAPS), numbered according to the Eu numbering system. In some embodiments, a multispecific binding molecule described herein comprises a human IgG1 Fc variant of a wild-type human IgG1 Fc region, wherein the Fc variant comprises any one or all of: an L234 (e.g., L234A), L235 (e.g., L235A), and/or G237 (e.g., G237A) mutation (LALAGA), numbered according to the Eu numbering system; an L234 (e.g., L234A), L235 (e.g., L235A), S267 (e.g., S267K), and/or P329 (e.g., P329A) mutation (LALASKPA), numbered according to the Eu numbering system; a D265 (e.g., D265A), P329 (e.g., P329A), and/or S267 (e.g., S267K) mutation (DAPASK), numbered according to the Eu numbering system; a G237 (e.g., G237A), D265 (e.g., D265A), and/or P329 (e.g., P329A) mutation (GADAPA), numbered according to the Eu numbering system; a G237 (e.g., G237A), D265 (e.g., D265A), P329 (e.g., P329A), and/or S267 (e.g., S267K) mutation (GADAPASK), numbered according to the Eu numbering system; a L234 (e.g., L234A), L235 (e.g., L235A), and/or P329 (e.g., P329G) mutation (LALAPG), numbered according to the Eu numbering system; or a L234 (e.g., L234A), L235 (e.g., L235A), and/or P329 (e.g., P329A) mutation (LALAPA), wherein the amino acid residues are numbered according to the Eu numbering system.

[0580] In some embodiments, the Fc region of a multispecific binding protein described herein comprises a mutation that results in reduced binding to an Fc receptor or reduced ADCC, ADCP, or CDC activity, e.g., an Fc region comprising: a D265 (e.g., D265A), N297 (e.g., N297A), and P329 (e.g., P329A) mutation (DANAPA), numbered according to the Eu numbering system; an L234 (e.g., L234A), L235 (e.g., L235A), and G237 (G237A) mutation (LALAGA), numbered according to the Eu numbering system; an L234 (L234A), L235 (e.g., L235A), S267 (e.g., S267K), and P329 (e.g., P329A) mutation (LALASKPA), numbered according to the Eu numbering system; a D265 (e.g., D265A), P329 (e.g., P329A), and S267 (e.g., S267K) mutation (DAPASK), numbered according to the Eu numbering system; a G237 (e.g., G237A), a D265 (e.g., D265A), and P329 (P329A) mutation (GADAPA), numbered according to the Eu numbering system; a G237 (e.g., G237A), D265 (e.g., D265A), P329 (e.g., P329A), and S267 (e.g., S267K) mutation (GADAPASK), numbered according to the Eu numbering system; an L234 (e.g., L234A), L235 (e.g., L235A), and P329 (e.g., P329G) mutation (LALAPG), numbered according to the Eu numbering system; or an L234 (e.g., L234A), L235 (e.g., L235A), and P329 (e.g., P329A) mutation (LALAPA), numbered according to the Eu numbering system.

[0581] It is understood that the terms “LALA,” “DAPA,” “DANAPA,” “LALADANAPS,” “LALAGA”, “LALASKPA”, “DAPASK”, “GADAPA”, “GADAPASK”, “LALAPG”, and “LALAPA” represent shorthand terminology for the different combinations of substitutions described herein rather than contiguous amino acid sequences.

TABLE 34
Exemplary Fc modifications

| Modification or mutation | Altered effector function |
|---|---|
| Leu235Glu | ADCC; |
| Leu234Ala/Leu235Ala (LALA) | ADCC; ADCP; CDC |
| Ser228Pro/Leu235Glu | |
| Leu234Ala/Leu235Ala/Pro329Gly | ADCP |
| Pro331Ser/Leu234Glu/Leu235Phe | CDC |
| Asp265Ala | ADCC, ADCP |
| Gly237Ala | ADCP |
| Glu318Ala | ADCP |
| Glu233Pro | |
| Gly236Arg/Leu328Arg | ADCC |
| His268Gln/Val309Leu/Ala330Ser/Pro331Ser | ADCC; ADCP; CDC |
| Val234Ala/Gly237Ala/Pro238Ser/ | ADCC; ADCP; CDC |
| His268Ala/Val309Leu/Ala330Ser/Pro331Ser | |
| Leu234Ala/L235Ala/Gly237Ala/P238Ser/ | ADCC; CDC |
| His268Ala/Ala330Ser/Pro331Ser | |
| Ala330Leu | CDC |
| Asp270Ala | CDC |
| Lys322Ala | CDC |
| Pro329Ala | CDC |
| Pro331Ala | CDC |
| Val264Ala | CDC |
| High mannose glycosylation | CDC |
| Phe241Ala | CDC |
| Asn297Ala or Gly or Gln | ADCC; ADCP; CDC |
| S228P/Phe234Ala/Leu235Ala | ADCC; CDC |

[0582] Compositions of Mesoporous Silica Particles, Viral Vectors, and Cell Activation Agents

[0583] Also described herein is a composition comprising an extended release agent, e.g., a population of mesoporous silica particles, and a viral vector. Also described herein is a composition, comprising a first population of mesoporous silica particles and a viral vector. In some embodiments, the MSPs (e.g., MSRs) further comprise a plurality of functional groups adsorbed or covalently bonded onto the surfaces lining the pores and/or nanochannels or the surface. In some embodiments, the functional group is a —OH (hydroxyl), amine, carboxylic acid, phosphonate, halide, azide, alkyne, epoxide, sulfhydryl, disulfide, polyethyleneimine, hydrophobic moiety or salts thereof In some embodiments, the functional group (i.e. —OH (hydroxyl), amine, carboxylic acid, phosphonate, halide, azide, alkyne, epoxide, sulfhydryl, disulfide, polyethyleneimine, hydrophobic moiety, or salts thereof) may be directly attached to the surface of the MSP. In some embodiments, the functional group is covalently bonded to the MSP (e.g., MSR) surface via a C₁ to C₂₀ alkyl linker. In other embodiments, the functional group is covalently bonded to the MSP surface via a polyethyleneglycol linker. In particular embodiments, the polyethylene glycol linker has the formula (—O(CH2-CH₂—)₁₋₂₅. In particular embodiments, the surface modification is a C₁ to C₂₀ alkyl perhaloalkyl or a C₁ to C₂₀ alkyl perfluoroalkyl.

[0584] In some embodiments, the MSPs (e.g., MSRs) are surface modified with a primary, secondary, tertiary, or quaternary amine. In particular embodiments, the mesoporous silica rods are modified with polyethyleneimine. In specific embodiments, the polyethyleneimine is branched or unbranched. In alternate embodiments, the polyethyleneimine group has an average molecular weight in the range of about 1000 to 20,000 Daltons (Da), as measured by gel permeation chromatography (GPC). In some embodiments, the polyethyleneimine group has an average molecular weight of about 1,200 to 15,000 Da, about 1,500 to 12,000 Da, about 2,000 Da, about 3,000 Da, about 4,000 Da, about 5,000 Da, about 6,000 Da, about 7,000 Da, about 8,000 Da, about 9,000 Da, or about 10,000 Da, as measured by gel permeation chromatography (GPC).

[0585] In some embodiments, the viral vector is conjugated to the mesoporous silica particles. In some embodiments, the viral vector is electrostatically or covalently conjugated to the mesoporous silica particles. In some embodiments, the electrostatic conjugation between the mesoporous silica particles and the viral vector is due to oppositely surface-charged viral vectors and mesoporous silica particles. For example, and without being bound by theory, mesoporous silica particles that are surface modified by polyethyleneimine or primary, secondary, tertiary, or quaternary ammonium groups that are positively charged can be conjugated to negatively surface-charged viral vectors. Thus, in some embodiments, the viral vector is negatively charged, and the mesoporous silica particles are positively charged. In some embodiments, the covalent conjugation between the mesoporous silica particles and the viral vector is achieved by methods known to those of skill in the art, either via linkers or without linkers. For example, and without limitation, the linkers may be polyethylene glycol, alkyl groups, polymers, polyamide linkages, etc.

[0586] In some aspects, provided herein includes pharmaceutical compositions comprising mesoporous silica particles as described herein, formulated for use in the manufacture of a population of immune effector cells, e.g., T lymphocyte cells. In some embodiments, the T lymphocyte cells are transduced with a CAR. In some embodiments, the MSPs are conjugated to a viral vector as described herein. In some embodiments, the MSPs are conjugated to a cell activation agent. IN some embodiments a cell activation agent is absorbed on the MSPs. In some embodiments, the MSPs for use in in the manufacture of a population of immune effector cells, e.g., T lymphocyte cells, may be surface modified as described herein.

[0587] In some embodiments, the composition is suitable for use as an injectable composition comprising mesoporous silica particles, a viral vector, and, optionally, a cell activation agent, wherein the viral vector comprises an expression vector comprising a recombinant polynucleotide comprising an expression control sequence operatively linked to a nucleotide sequence to be expressed. In some embodiments, the viral vector is conjugated to the mesoporous silica particles as described herein. In some embodiments, the cell activation agent is absorbed on or conjugated to the mesoporous silica particles as described herein. Adsorption to the MSP (e.g., MSR) surface is as commonly understood as a molecule adhering to the surface.

[0588] Without wishing to be bound by theory, in some embodiments, an MSP-virus composition, e.g., a composition comprising an MSP and a viral vector, e.g., a viral vector encoding a CAR, limits viral vector drainage to the draining lymph node, decreasing potential off-site transduction, compared to an otherwise similar composition lacking an MSP.

[0589] In compositions of mesoporous silica particles described herein, the MSPs (e.g., MSRs) may be present in a concentration of 0.01 to 1000 μg/ml. In alternative embodiments, the concentration of MSPs or MSRs in the compositions described herein may be 0.1 to 500 μg/ml, 0.5 to 100 μg/ml, 1 to 90 μg/ml, 1 to 80 μg/ml, 1 to 70 μg/ml, 1 to 60 μg/ml, 1 to 50 μg/ml, or 1 to 40 μg/ml.

[0590] In particular embodiments, the MSPs (e.g., MSRs) may be present in a concentration of about 1 μg/ml, 10 μg/ml, 20 μg/ml, 30 μg/ml, 40 μg/ml, 50 μg/ml, 60 μg/ml, 70 μg/ml, 80 μg/ml, 90 μg/ml, 100 μg/ml, 110 μg/ml, 120 μg/ml, 130 μg/ml, 140 μg/ml, or 150 μg/ml.

[0591] In general, compositions described herein may be administered in therapeutically effective amounts as described above via any of the usual and acceptable modes known in the art, either singly or in combination with one or more therapeutic agents.

[0592] Injectable compositions may be aqueous isotonic suspensions. The compositions may be sterilized and/or contain adjuvants, such as preserving, stabilizing, wetting or emulsifying agents, solution promoters, salts for regulating the osmotic pressure and/or buffers. In addition, they may also contain other therapeutically effective substances.

[0593] Pharmaceutical compositions of the present invention may be administered in a manner appropriate to the disease to be treated (or prevented). The quantity and frequency of administration will be determined by such factors as the condition of the patient, and the type and severity of the patient's disease, although appropriate dosages may be determined by clinical trials.

[0594] In some embodiments, the pharmaceutical composition is substantially free of, e.g., there are no detectable levels of a contaminant, e.g., selected from the group consisting of endotoxin, mycoplasma, replication competent lentivirus (RCL), p24, VSV-G nucleic acid, HIV gag, residual anti-CD3/anti-CD28 coated beads, mouse antibodies, pooled human serum, bovine serum albumin, bovine serum, culture media components, vector packaging cell or plasmid components, a bacterium and a fungus. In some embodiments, the bacterium is at least one selected from the group consisting of Alcaligenes faecalis, Candida albicans, Escherichia coli, Haemophilus influenza, Neisseria meningitides, Pseudomonas aeruginosa, Staphylococcus aureus, Streptococcus pneumonia, and Streptococcus pyogenes group A.

[0595] The pharmaceutical composition (or formulation) for application may be packaged in a variety of ways depending upon the method used for administering the compositions described herein. Generally, an article for distribution includes a container having deposited therein the pharmaceutical formulation in an appropriate form. Suitable containers are well-known to those skilled in the art and include materials such as bottles (plastic and glass), sachets, ampoules, plastic bags, metal cylinders, and the like. The container may also include a tamper-proof assemblage to prevent indiscreet access to the contents of the package. In addition, the container has deposited thereon a label that describes the contents of the container. The label may also include appropriate warnings.

[0596] In some embodiments, the compositions described herein further include a cell activation agent. In some embodiments, cell activation agent is a T cell stimulating compound, an anti-idiotype antibody to a CAR antigen binding domain, and/or tumor antigen. In some embodiments, the cell activation agent is conjugated to or adsorbed on the first population of mesoporous silica particles. In additional or alternative embodiments, the T cell stimulating compound or tumor antigen is conjugated to or adsorbed on to a second population of mesoporous silica particles. In further embodiments, the T-cell stimulating compound or tumor antigen is IL-2, IL-15, GM-CSF, anti-CD2 mAb, anti-CD3 mAb, anti-CD28 mAb, neo-antigen peptides, peptides from shared antigens such as TRP2, gp100, tumor cell lysate, CD19, CD20, CD22, ROR1, mesothelin, CD33/IL3Ra, c-Met, PSMA, Glycolipid F77, EGFRvIII, GD-2, NY-ESO-1 TCR, and/or MAGE A3 TCR. In some embodiments, the cell activation agent comprises a CD3/TCR complex and/or an agent that stimulates a costimulatory molecule and/or growth factor receptor, optionally, wherein the cell activation agent is a multispecific binding molecule comprising an agent that stimulates a CD3/TCR complex and an agent that stimulates a costimulatory molecule and/or growth factor receptor

[0597] In embodiments where the cell activation agent is conjugated to the second population of mesoporous silica particles, the T cell stimulating compound or tumor antigen may be conjugated to a lipid bilayer on the surface of the second population of mesoporous silica particles. Methods of making lipid bilayers on the mesoporous silica particles are known. See e.g., International Appl. Publ. No. WO 2018/013797. Briefly, liposomes containing predefined amounts of a label such as biotin are used to coat the MSPs. The labels may then be used to affix to the T-cell stimulating compound using a complementary label, e.g., streptavidin. Lipids used to make liposomes are known to those of skill in the art and include, without limitation, vesicle-forming lipids having two hydrocarbon chains, typically acyl chains, and a polar head group. Included in this class are the phospholipids, such as phosphatidylcholine (PC), phosphatidylethanolamine (PE), phosphatidic acid (PA), phosphatidylinositol (PI), and sphingomyelin (SM), where the two hydrocarbon chains are typically between about 14-22 carbon atoms in length and have varying degrees of unsaturation. In some embodiments, the lipid is a relatively unsaturated phospholipid (having one, two or three double bonds in the hydrocarbon chain). In some embodiments, the lipid is a phosphatidylcholine. Phosphatidylcholine is a phospholipid that incorporates choline as a headgroup and combines a glycerophosphoric acid with two fatty acids. In some embodiments, the phosphatidylcholine is a palmitoyl phosphatidylcholine or a oleoyl phosphatidylcholine or a 1-palmitoyl,2-oleoyl-phosphatidylcholine. More than one type of lipid may be used in preparing the liposome composition. The selection of lipids and proportions can be varied to achieve a desired degree of fluidity or rigidity, and/or to control stability. Where more than one type of lipid is used in preparing the liposome composition, a suitable amount of the relatively unsaturated lipid (such as PC) should be used in order to form stable liposomes. In some embodiments, at least 45-50 mol % of the lipids used in the formulation are PC. The liposomes may also include lipids derivatized with a hydrophilic polymer such as polyethylene glycol (PEG). Suitable hydrophilic polymers include polyvinylpyrrolidone, polyvinylmethylether, polymethyloxazoline, polyethyloxazoline, polyhydroxypropyloxazoline, polyhydroxypropylmethacrylamide, polymethacrylamide, polydimethylacrylamide, polyhydroxypropylmethacrylate, polyhydroxyethylacrylate, hydroxymethylcellulose, hydroxyethylcellulose, polyethyleneglycol, polyaspartamide, and hydrophilic peptide sequences. Methods of preparing lipids derivatized with hydrophilic polymers are known (see e.g. U.S. Pat. No. 5,395,619, which is incorporated herein by reference).

[0598] In some embodiments, the first population or second population of mesoporous silica particles further includes a cytokine. The cytokine may be, without limitation, IL-1, IL-2, IL-4, IL-5, IL-7, IL-10, IL-12, IL-15, IL-17, IL-21, or transforming growth factor beta (TGF-β), or an agonist thereof, a mimetic thereof, a variant thereof, a functional fragment thereof, or a combination thereof. In particular embodiments, the cytokine is conjugated to or adsorbed on the first or second population of mesoporous silica particles. In embodiments, where the cytokine is adsorbed on the second population of mesoporous silica particles, the second population of MSPs (e.g., MSRs) may be further covered by a lipid bilayer, as described above.

[0599] Methods

[0600] Aspects disclosed herein relate to a method of transducing cells in vivo comprising administering a biomaterial comprising a cell recruitment factor; an extended release agent, e.g., a first population of mesoporous silica particles; a viral vector; and, optionally, a cell activation agent to a subject. In some embodiments, the components are administered simultaneously or sequentially. In some embodiments, the biomaterial comprising the cell recruitment factor is administered first. In some embodiments, the first population of mesoporous silica rods, the viral vector, and, optionally, the cell activation agent is administered simultaneously and, optionally, after the biomaterial.

[0601] Aspects disclosed herein relate to a method of transducing cells in vivo comprising administering a biomaterial and a cell recruitment factor; an extended release agent, e.g., a first population of mesoporous silica particles; a viral vector; and, optionally, a cell activation agent to a subject. In some embodiments, the components are administered simultaneously or sequentially. In some embodiments, the biomaterial and the cell recruitment factor are administered first. In some embodiments, the first population of mesoporous silica rods, the viral vector, and, optionally, the cell activation agent is administered simultaneously and, optionally, after the biomaterial and the cell recruitment factor.

[0602] In some embodiments, the method further comprises: contacting T lymphocytes with a composition comprising a first population of mesoporous silica particles (e.g., MSRs), a viral vector, and, optionally, a cell activation agent; wherein the viral vector comprises an expression vector comprising the recombinant polynucleotide comprising an expression control sequence operatively linked to a nucleotide sequence to be expressed.

[0603] In some embodiments of the presently described methods, the methods result in an increase in the proportion of T lymphocytes in the population. In some embodiments, method comprises delivering a viral vector to a desired site of action in a subject.

[0604] Further aspects relate to a method of treating a subject having a disease, disorder, or condition comprising administering a biomaterial comprising a cell recruitment factor; an extended release agent, e.g., a first population of mesoporous silica particles; a viral vector; and, optionally, a cell activation agent to a subject. In some embodiments, the components are administered simultaneously or sequentially. In some embodiments, the biomaterial comprising the cell recruitment factor is administered first. In some embodiments, the first population of mesoporous silica rods, the viral vector, and, optionally, the cell activation agent is administered simultaneously and, optionally, after the biomaterial.

[0605] Further aspects relate to a method of treating a subject having a disease, disorder, or condition comprising administering a biomaterial and a cell recruitment factor; an extended release agent, e.g., a first population of mesoporous silica particles; a viral vector; and, optionally, a cell activation agent to a subject. In some embodiments, the components are administered simultaneously or sequentially. In some embodiments, the biomaterial and the cell recruitment factor are administered first. In some embodiments, the first population of mesoporous silica rods, the viral vector, and, optionally, the cell activation agent is administered simultaneously and, optionally, after the biomaterial and the cell recruitment factor.

[0606] In some embodiments, the subject has cancer. In some embodiments, the subject has cancer expressing one or more tumor antigen selected from the group consisting of: TSHR, CD19, CD123, CD22, CD30, CD171, CS-1, CLL-1, CD33, EGFRvIII, GD2, GD3, BCMA, Tn Ag, PSMA, ROR1, FLT3, FAP, TAG72, CD38, CD44v6, CEA, EPCAM, B7H3, KIT, IL-13Ra2, Mesothelin, IL-11Ra, PSCA, PRSS21, VEGFR2, LewisY, CD24, PDGFR-beta, SSEA-4, CD20, Folate receptor alpha, ERBB2 (Her2/neu), MUC1, EGFR, NCAM, Prostase, PAP, ELF2M, Ephrin B2, IGF-I receptor, CAIX, LMP2, gp100, bcr-abl, tyrosinase, EphA2, Fucosyl GM1, sLe, GM3, TGS5, HMWMAA, o-acetyl-GD2, Folate receptor beta, TEM1/CD248, TEM7R, CLDN6, GPRC5D, CXORF61, CD97, CD179a, ALK, Polysialic acid, PLAC1, GloboH, NY-BR-1, UPK2, HAVCR1, ADRB3, PANX3, GPR20, LY6K, OR51E2, TARP, WT1, NY-ESO-1, LAGE-1a, MAGE-A1, legumain, HPV E6,E7, MAGE A1, ETV6-AML, sperm protein 17, XAGE1, Tie 2, MAD-CT-1, MAD-CT-2, Fos-related antigen 1, p53, p53 mutant, prostein, survivin and telomerase, PCTA-1/Galectin 8, MelanA/MART1, Ras mutant, hTERT, sarcoma translocation breakpoints, ML-IAP, ERG (TMPRSS2 ETS fusion gene), NA17, PAX3, Androgen receptor, Cyclin B1, MYCN, RhoC, TRP-2, CYP1B1, BORIS, SART3, PAX5, OY-TES1, LCK, AKAP-4, SSX2, RAGE-1, human telomerase reverse transcriptase, RU1, RU2, intestinal carboxyl esterase, mut hsp70-2, CD79a, CD79b, CD72, LAIR1, FCAR, LILRA2, CD300LF, CLEC12A, BST2, EMR2, LY75, GPC3, FCRL5, IGLL1, and any combination thereof.

[0607] In some embodiments, the method further comprises: administering to a subject a composition comprising a first population of mesoporous silica particles and a viral vector; wherein the viral vector comprises an expression vector comprising a recombinant polynucleotide comprising an expression control sequence operatively linked to a nucleotide sequence that expresses a chimeric antigen receptor (CAR) that is engineered to target the tumor antigen.

[0608] In some embodiments of the method, the composition further comprises a T cell stimulating compound or tumor antigen conjugated to or adsorbed on the first population of mesoporous silica particles or a second population of mesoporous silica particles, or both populations of MSPs (e.g., MSRs). Alternatively, the method includes administering a second extended release agent, e.g., a second population of mesoporous silica particles in combination with, e.g., simultaneously or shortly after, administration of the first population of MSPs (e.g., MSRs). Alternatively, the second population of MSPs (e.g., MSRs) may be administered after a prolonged period of time after administration of the first population of MSPs.

[0609] In some embodiments, the extended release agent comprises a first population of MSPs and the second extended release agent comprises a second population of MSPs.

[0610] In some embodiments, the method comprises administering a cell activation agent, wherein the cell activation agent is conjugated to or adsorbed on the first or second population of mesoporous silica particles.

[0611] In some embodiments, the second population of MSPs (e.g., MSRs) is administered to the subject simultaneously (e.g., administered on the same day) with or shortly after administration (e.g., administered 1 day, 2 days, 3 days, 4 days, 5 days, 6 days, or 7 days after administration) of the first population of MSPs. In other embodiments, the cytokine is administered to the subject after a prolonged period of time (e.g., e.g., at least 2 weeks, 3 weeks, 4 weeks, 6 weeks, 8 weeks, 10 weeks, or more) after administration of the first population of MSPs.

[0612] In some embodiments of any of the aforesaid methods or uses, the disease, disorder, or condition is associated with a tumor antigen, e.g., a tumor antigen described herein, selected from a proliferative disease such as a cancer or malignancy or a precancerous condition such as a myelodysplasia, a myelodysplastic syndrome or a preleukemia, or is a non-cancer related indication associated with expression of a tumor antigen described herein. In some embodiments, the disease is a cancer described herein, e.g., a cancer described herein as being associated with a target described herein. In some embodiments, the disease is a hematologic cancer. In some embodiments, the hematologic cancer is leukemia. In some embodiments, the cancer is selected from the group consisting of one or more acute leukemias including but not limited to B-cell acute lymphoid leukemia (“BALL”), T-cell acute lymphoid leukemia (“TALL”), acute lymphoid leukemia (ALL); one or more chronic leukemias including but not limited to chronic myelogenous leukemia (CML), chronic lymphocytic leukemia (CLL); additional hematologic cancers or hematologic conditions including, but not limited to B cell prolymphocytic leukemia, blastic plasmacytoid dendritic cell neoplasm, Burkitt©lymphoma, diffuse large B cell lymphoma, follicular lymphoma, hairy cell leukemia, small cell- or a large cell-follicular lymphoma, malignant lymphoproliferative conditions, MALT lymphoma, mantle cell lymphoma, Marginal zone lymphoma, multiple myeloma, myelodysplasia and myelodysplastic syndrome, non-Hodgkin lymphoma, Hodgkin lymphoma, plasmablastic lymphoma, plasmacytoid dendritic cell neoplasm, Waldenstrom macroglobulinemia, and “preleukemia” which are a diverse collection of hematological conditions united by ineffective production (or dysplasia) of myeloid blood cells, and to disease associated with expression of a tumor antigen described herein include, but not limited to, atypical and/or non-classical cancers, malignancies, precancerous conditions or proliferative diseases expressing a tumor antigen as described herein; and any combination thereof. In another embodiment, the disease associated with a tumor antigen described herein is a solid tumor.

[0613] In embodiments, the cancer is selected from the group consisting of colon cancer, rectal cancer, renal-cell carcinoma, liver cancer, non-small cell carcinoma of the lung, cancer of the small intestine, cancer of the esophagus, melanoma, bone cancer, pancreatic cancer, skin cancer, cancer of the head or neck, cutaneous or intraocular malignant melanoma, uterine cancer, ovarian cancer, rectal cancer, cancer of the anal region, stomach cancer, testicular cancer, uterine cancer, carcinoma of the fallopian tubes, carcinoma of the endometrium, carcinoma of the cervix, carcinoma of the vagina, carcinoma of the vulva, Hodgkins Disease, non-Hodgkins lymphoma, cancer of the endocrine system, cancer of the thyroid gland, cancer of the parathyroid gland, cancer of the adrenal gland, sarcoma of soft tissue, cancer of the urethra, cancer of the penis, solid tumors of childhood, cancer of the bladder, cancer of the kidney or ureter, carcinoma of the renal pelvis, neoplasm of the central nervous system (CNS), primary CNS lymphoma, tumor angiogenesis, spinal axis tumor, brain stem glioma, pituitary adenoma, Kaposis sarcoma, epidermoid cancer, squamous cell cancer, T-cell lymphoma, environmentally induced cancers, combinations of said cancers, and metastatic lesions of said cancers.

[0614] In some embodiments, a cancer that can be treated with CAR-expressing cell of the present invention is multiple myeloma. Generally, myeloma cells are thought to be negative for a cancer associate antigen as described herein expression by flow cytometry. Thus, in some embodiments, a CD19 CAR, e.g., as described herein, may be used to target myeloma cells. In some embodiments, cars of the present invention therapy can be used in combination with one or more additional therapies, e.g., lenalidomide treatment.

[0615] In various aspects, the immune effector cells (e.g., T cells, NK cells) generated by the methods described herein and administered to the patient, or their progeny, persist in the patient for at least four months, five months, six months, seven months, eight months, nine months, ten months, eleven months, twelve months, thirteen months, fourteen month, fifteen months, sixteen months, seventeen months, eighteen months, nineteen months, twenty months, twenty-one months, twenty-two months, twenty-three months, two years, three years, four years, or five years after administration of the T cell or NK cell to the patient.

[0616] The invention also includes a type of cellular therapy where immune effector cells (e.g., T cells, NK cells) are modified, e.g., by in vitro or in vivo transcribed RNA, to transiently express a chimeric antigen receptor (CAR). The resultant cells are able to kill tumor cells in the subject or patient. Thus, in various aspects, the immune effector cells (e.g., T cells, NK cells) are present for less than one month, e.g., three weeks, two weeks, one week, after administration of the compositions as described herein.

[0617] Without wishing to be bound by any particular theory, the anti-tumor immunity response elicited by the CAR-modified immune effector cells (e.g., T cells, NK cells) may be an active or a passive immune response, or alternatively may be due to a direct vs indirect immune response. In some aspects, the CAR transduced immune effector cells (e.g., T cells, NK cells) exhibit specific proinflammatory cytokine secretion and potent cytolytic activity in response to human cancer cells expressing the a cancer associate antigen as described herein, resist soluble a cancer associate antigen as described herein inhibition, mediate bystander killing and mediate regression of an established human tumor. For example, antigen-less tumor cells within a heterogeneous field of a cancer associate antigen as described herein-expressing tumor may be susceptible to indirect destruction by a cancer associate antigen as described herein-redirected immune effector cells (e.g., T cells, NK cells) that has previously reacted against adjacent antigen-positive cancer cells.

[0618] In some aspects, the fully human CAR-modified immune effector cells (e.g., T cells, NK cells) of the invention may be a type of vaccine for ex vivo immunization and/or in vivo therapy in a mammal. In some aspects, the mammal is a human.

[0619] In some aspects the CAR-expressing cells of the inventions may be used to treat a proliferative disease such as a cancer or malignancy or is a precancerous condition such as a myelodysplasia, a myelodysplastic syndrome or a preleukemia. Further a disease associated with a cancer associate antigen as described herein expression include, but not limited to, e.g., atypical and/or non-classical cancers, malignancies, precancerous conditions or proliferative diseases expressing a cancer associated antigen as described herein. Non-cancer related indications associated with expression of a cancer associate antigen as described herein include, but are not limited to, e.g., autoimmune disease, (e.g., lupus), inflammatory disorders (allergy and asthma) and transplantation.

[0620] In some aspects the CAR-expressing cells of the inventions may be used to treat an autoimmune disease, an inflammatory disease, or transplant. Exemplary autoimmune diseases include but are not limited to Addison's disease, agammaglobulinemia, alopecia areata, amyloidosis, ankylosing spondylitis, anti-GBM/anti-TBM nephritis, antiphospholipid syndrome (APS), autoimmune hepatitis, autoimmune inner ear disease (AIED), axonal & neuronal neuropathy (AMAN), Behcet's disease, Bullous pemphigoid, Castleman disease (CD), Celiac disease, Chagas disease, chronic inflammatory demyelinating polyneuropathy (CIDP), chronic recurrent multifocal osteomyelitis (CRMO), Churg-Strauss, Cicatricial pemphigoid/benign mucosal pemphigoid, Cogan's syndrome, Cold agglutinin disease, Congenital heart block, Coxsackie myocarditis, CREST syndrome, Crohn's disease, dermatitis herpetiformis, dermatomyositis, Devic's disease (neuromyelitis optica), Discoid lupus, Dressler's syndrome, endometriosis, eosinophilic esophagitis (EoE), eosinophilic fasciitis, erythema nodosum, essential mixed cryoglobulinemia, Evans syndrome, fibromyalgia, fibrosing alveolitis, giant cell arteritis (temporal arteritis), giant cell myocarditis, Glomerulonephritis, Goodpasture's syndrome, Granulomatosis with Polyangiitis, Graves' disease, Guillain-Barre syndrome, Hashimoto's thyroiditis, hemolytic anemia, Henoch-Schonlein purpura (HSP), herpes gestationis or pemphigoid gestationis (PG), hypogammalglobulinemia, IgA nephropathy, IgG4-related sclerosing disease, inclusion body myositis (IBM), interstitial cystitis (IC), juvenile arthritis, juvenile diabetes (Type 1 diabetes), juvenile myositis (JM), Kawasaki disease, Lambert-Eaton syndrome, leukocytoclastic vasculitis, Lichen planus, Lichen sclerosus, Ligneous conjunctivitis, linear IgA disease (LAD), lupus, Lyme disease chronic, Meniere's disease, microscopic polyangiitis (MPA), mixed connective tissue disease (MCTD), Mooren's ulcer, Mucha-Habermann disease, multiple sclerosis (MS), Myasthenia gravis, Myositis, Narcolepsy, Neuromyelitis optica, neutropenia, ocular cicatricial pemphigoid, optic neuritis, palindromic rheumatism (PR), PANDAS (Pediatric Autoimmune Neuropsychiatric Disorders Associated with Streptococcus), paraneoplastic cerebellar degeneration (PCD), Paroxysmal nocturnal hemoglobinuria (PNH), Parry Romberg syndrome, Pars planitis (peripheral uveitis), Parsonnage-Turner syndrome, Pemphigus, peripheral neuropathy, Perivenous encephalomyelitis, pernicious anemia (PA), POEMS syndrome (polyneuropathy, organomegaly, endocrinopathy, monoclonal gammopathy, skin changes), polyarteritis nodosa, polymyalgia rheumatica, polymyositis, postmyocardial infarction syndrome, postpericardiotomy syndrome, primary biliary cirrhosis, primary sclerosing cholangitis, progesterone dermatitis, psoriasis, psoriatic arthritis, pure red cell aplasia (PRCA), pyoderma gangrenosum, Raynaud's phenomenon, Reactive Arthritis, Reflex sympathetic dystrophy, Reiter's syndrome, relapsing polychondritis, restless legs syndrome (RLS), retroperitoneal fibrosis, rheumatic fever, rheumatoid arthritis (RA), sarcoidosis, Schmidt syndrome, scleritis, scleroderma, Sjogren's syndrome, sperm & testicular autoimmunity, Stiff person syndrome (SPS), subacute bacterial endocarditis (SBE), Susac's syndrome, sympathetic ophthalmia (SO), Takayasu's arteritis, temporal arteritis/Giant cell arteritis, thrombocytopenic purpura (TTP), Tolosa-Hunt syndrome (THS), transverse myelitis, type 1 diabetes, ulcerative colitis (UC), undifferentiated connective tissue disease (UCTD), uveitis, vasculitis, vitiligo, or Wegener's granulomatosis (Granulomatosis with Polyangiitis (GPA)). In some embodiments, the CAR binds to a B cell antigen, e.g., CD 19, CD20, CD22, CD123, FcRn5, FcRn2, BCMA, CS-1 and CD138.

[0621] The CAR-modified immune effector cells (e.g., T cells, NK cells) of the present invention may be administered either alone, or as a pharmaceutical composition in combination with diluents and/or with other components such as IL-2 or other cytokines or cell populations.

[0622] Hematologic Cancer

[0623] Hematological cancer conditions are the types of cancer such as leukemia, lymphoma, and malignant lymphoproliferative conditions that affect blood, bone marrow and the lymphatic system.

[0624] Leukemia can be classified as acute leukemia and chronic leukemia. Acute leukemia can be further classified as acute myelogenous leukemia (AML) and acute lymphoid leukemia (ALL). Chronic leukemia includes chronic myelogenous leukemia (CML) and chronic lymphoid leukemia (CLL). Other related conditions include myelodysplastic syndromes (MDS, formerly known as “preleukemia”) which are a diverse collection of hematological conditions united by ineffective production (or dysplasia) of myeloid blood cells and risk of transformation to AML. Lymphoma is a group of blood cell tumors that develop from lymphocytes. Exemplary lymphomas include non-Hodgkin lymphoma and Hodgkin lymphoma.

[0625] The present invention also provides methods for inhibiting the proliferation or reducing a cancer associated antigen as described herein, the methods comprising contacting a population of cells comprising a cancer associated antigen as described herein with a composition comprising a mesoporous silica particles and a viral vector. In a specific aspect, the MSPs are surface modified as described herein. In other embodiments, the viral vector comprises an expression vector comprising a recombinant polynucleotide comprising an expression control sequence operatively linked to a nucleotide sequence to be expressed. Exemplary nucleotide sequences express a chimeric antigen receptor (CAR), engineered TCR, cytokines, chemokines, shRNA to block an inhibitory molecule, or mRNA to induce expression of a protein. In some aspects, a CAR-expressing T cell or NK cell of the invention reduces the quantity, number, amount or percentage of cells and/or cancer cells by at least 25%, at least 30%, at least 40%, at least 50%, at least 65%, at least 75%, at least 85%, at least 95%, or at least 99% in a subject with or animal model for myeloid leukemia or another cancer associated with a cancer associated antigen as described herein-expressing cells relative to a negative control. In some aspects, the subject is a human.

### Combination Therapies

[0626] Administered “in combination”, as used herein, means that two (or more) different treatments are delivered to the subject during the course of the subject [symbol] affliction with the disorder, e.g., the two or more treatments are delivered after the subject has been diagnosed with the disorder and before the disorder has been cured or eliminated or treatment has ceased for other reasons. In some embodiments, the delivery of one treatment is still occurring when the delivery of the second begins, so that there is overlap in terms of administration. This is sometimes referred to herein as “simultaneous” or “concurrent delivery”. In other embodiments, the delivery of one treatment ends before the delivery of the other treatment begins. In some embodiments of either case, the treatment is more effective because of combined administration. For example, the second treatment is more effective, e.g., an equivalent effect is seen with less of the second treatment, or the second treatment reduces symptoms to a greater extent, than would be seen if the second treatment were administered in the absence of the first treatment, or the analogous situation is seen with the first treatment. In some embodiments, delivery is such that the reduction in a symptom, or other parameter related to the disorder is greater than what would be observed with one treatment delivered in the absence of the other. The effect of the two treatments can be partially additive, wholly additive, or greater than additive. The delivery can be such that an effect of the first treatment delivered is still detectable when the second is delivered.

[0627] In some embodiments, the methods or uses are carried out in combination with an agent that increases the efficacy of the immune effector cell, e.g., an agent as described herein. In some embodiments of the methods or uses described herein, the mesoporous silica rod composition is administered in combination with an agent that increases the efficacy of the immune effector cell, e.g., one or more of a protein phosphatase inhibitor, a kinase inhibitor, a cytokine, an inhibitor of an immune inhibitory molecule; or an agent that decreases the level or activity of a T_{REG} cell.

[0628] In some embodiments of the methods or uses described herein, the protein phosphatase inhibitor is a SHP-1 inhibitor and/or an SHP-2 inhibitor.

[0629] In other embodiments of the methods or uses described herein, kinase inhibitor is chosen from one or more of a CDK4 inhibitor, a CDK4/6 inhibitor (e.g., palbociclib), a BTK inhibitor (e.g., ibrutinib or RN-486), an mTOR inhibitor (e.g., rapamycin or everolimus (RAD001), an MNK inhibitor, or a dual P13K/mTOR inhibitor. In some embodiments, the BTK inhibitor does not reduce or inhibit the kinase activity of interleukin-2-inducible kinase (ITK).

[0630] In other embodiments of the methods or uses described herein, the agent that inhibits the immune inhibitory molecule comprises an antibody or antibody fragment, an inhibitory nucleic acid, a clustered regularly interspaced short palindromic repeats (CRISPR), a transcription-activator like effector nuclease (TALEN), or a zinc finger endonuclease (ZFN) that inhibits the expression of the inhibitory molecule.

[0631] In other embodiments of the methods or uses described herein, the agent that decreases the level or activity of the TREG cells is chosen from cyclophosphamide, anti-GITR antibody, CD25-depletion, or a combination thereof.

[0632] In some embodiments of the methods or uses described herein, the immune inhibitory molecule is selected from the group consisting of PD1, PD-L1, CTLA-4, TIM-3, LAG-3, VISTA, BTLA, TIGIT, LAIR1, CD160, 2B4, TGFR beta, CEACAM-1, CEACAM-3, and CEACAM-5.

[0633] In other embodiments, the agent that inhibits the inhibitory molecule comprises a first polypeptide comprising an inhibitory molecule or a fragment thereof and a second polypeptide that provides a positive signal to the cell, and wherein the first and second polypeptides are expressed on the CAR-containing immune cells, wherein (i) the first polypeptide comprises PD1, PD-L1, CTLA-4, TIM-3, LAG3, VISTA, BTLA, TIGIT, LAIR1, CD160, 2B4, TGFR beta, CEACAM-1, CEACAM-3, and CEACAM-5 or a fragment thereof, and/or (ii) the second polypeptide comprises an intracellular signaling domain comprising a primary signaling domain and/or a costimulatory signaling domain. In some embodiments, the primary signaling domain comprises a functional domain of CD3 zeta; and/or the costimulatory signaling domain comprises a functional domain of a protein selected from 41BB, CD27, and CD28. In other embodiments, cytokine is chosen from IL-7, IL-15, or IL-21, or combinations thereof.

[0634] In other embodiments, the immune effector cell comprising the CAR molecule and a second, e.g., any of the combination therapies disclosed herein (e.g., the agent that that increases the efficacy of the immune effector cell) are administered substantially simultaneously or sequentially.

[0635] In other embodiments, the immune cell comprising the CAR molecule is administered in combination with a molecule that targets GITR and/or modulates GITR function. In some embodiments, the molecule targeting GITR and/or modulating GITR function is administered prior to the CAR-expressing cell or population of cells, or prior to apheresis.

[0636] In some embodiments, lymphocyte infusion, for example allogeneic lymphocyte infusion, is used in the treatment of the cancer, wherein the lymphocyte infusion comprises at least one CAR-expressing cell of the present invention. In some embodiments, autologous lymphocyte infusion is used in the treatment of the cancer, wherein the autologous lymphocyte infusion comprises at least one CAR-expressing cell described herein.

[0637] In some embodiments, the cell is a T cell and the T cell is diaglycerol kinase (DGK) deficient. In some embodiments, the cell is a T cell and the T cell is Ikaros deficient. In some embodiments, the cell is a T cell and the T cell is both DGK and Ikaros deficient.

[0638] In embodiments of any of the aforesaid methods or uses, there may be a further administration of an agent that treats the disease associated with expression of the tumor antigen, e.g., any of the second or third therapies disclosed herein. Additional exemplary combinations include one or more of the following.

[0639] In another embodiment, there may be a further administration of another agent, e.g., a kinase inhibitor and/or checkpoint inhibitor described herein. For example, there may be a further administration of an agent which enhances the activity of a CAR-expressing cell.

[0640] For example, in some embodiments, the agent that enhances the activity of a CAR-expressing cell can be an agent which inhibits an inhibitory molecule (e.g., an immune inhibitor molecule). Examples of inhibitory molecules include PD1, PD-L1, CTLA-4, TIM-3, CEACAM (e.g., CEACAM-1, CEACAM-3 and/or CEACAM-5), LAG-3, VISTA, BTLA, TIGIT, LAIR1, CD160, 2B4, and TGFR beta.

[0641] In some embodiments, the agent that inhibits the inhibitory molecule is an inhibitory nucleic acid is a dsRNA, a siRNA, or a shRNA. In embodiments, the inhibitory nucleic acid is linked to the nucleic acid that encodes a component of the CAR molecule. For example, the inhibitory molecule can be expressed on the CAR-expressing cell.

[0642] In another embodiment, the agent which inhibits an inhibitory molecule, e.g., is a molecule described herein, e.g., an agent that comprises a first polypeptide, e.g., an inhibitory molecule, associated with a second polypeptide that provides a positive signal to the cell, e.g., an intracellular signaling domain described herein. In some embodiments, the agent comprises a first polypeptide, e.g., of an inhibitory molecule such as PD-1, PD-L1, CTLA-4, TIM-3, CEACAM (e.g., CEACAM-1, CEACAM-3 and/or CEACAM-5), LAG-3, VISTA, BTLA, TIGIT, LAIR1, CD160, 2B4, or TGFR beta, or a fragment of any of these (e.g., at least a portion of the extracellular domain of any of these), and a second polypeptide which is an intracellular signaling domain described herein (e.g., comprising a costimulatory domain (e.g., 41BB, CD27 or CD28, e.g., as described herein) and/or a primary signaling domain (e.g., a CD3 zeta signaling domain described herein). In some embodiments, the agent comprises a first polypeptide of PD1 or a fragment thereof (e.g., at least a portion of the extracellular domain of PD1), and a second polypeptide of an intracellular signaling domain described herein (e.g., a CD28 signaling domain described herein and/or a CD3 zeta signaling domain described herein).

[0643] In some embodiments, the CAR-expressing immune effector cell of the present invention, e.g., T cell or NK cell, is administered to a subject that has received a previous stem cell transplantation, e.g., autologous stem cell transplantation.

[0644] In some embodiments, the CAR-expressing immune effector cell of the present invention, e.g., T cell or NK cells, is administered to a subject that has received a previous dose of melphalan.

[0645] In some embodiments, the cell expressing a CAR molecule, e.g., a CAR molecule described herein, is administered in combination with an agent that increases the efficacy of a cell expressing a CAR molecule, e.g., an agent described herein.

[0646] In some embodiments, the cell expressing a CAR molecule, e.g., a CAR molecule described herein, is administered in combination with an agent that ameliorates one or more side effect associated with administration of a cell expressing a CAR molecule, e.g., an agent described herein.

[0647] In some embodiments, the cell expressing a CAR molecule, e.g., a CAR molecule described herein, is administered in combination with an agent that treats the disease associated with a cancer associated antigen as described herein, e.g., an agent described herein.

[0648] In some embodiments, a cell expressing two or more CAR molecules, e.g., as described herein, is administered to a subject in need thereof to treat cancer. In some embodiments, a population of cells including a CAR expressing cell, e.g., as described herein, is administered to a subject in need thereof to treat cancer.

[0649] In some embodiments of the methods or uses described herein, the CAR molecule is administered in combination with another agent. In some embodiments, the agent can be a kinase inhibitor, e.g., a CDK4/6 inhibitor, a BTK inhibitor, an mTOR inhibitor, a MNK inhibitor, or a dual PI3K/mTOR inhibitor, and combinations thereof. In some embodiments, the kinase inhibitor is a CDK4 inhibitor, e.g., a CDK4 inhibitor described herein, e.g., a CD4/6 inhibitor, such as, e.g., 6-Acetyl-8-cyclopentyl-5-methyl-2-(5-piperazin-1-yl-pyridin-2-ylamino)-8H-pyrido[2,3-d]pyrimidin-7-one, hydrochloride (also referred to as palbociclib or PD0332991). In some embodiments, the kinase inhibitor is a BTK inhibitor, e.g., a BTK inhibitor described herein, such as, e.g., ibrutinib. In some embodiments, the kinase inhibitor is an mTOR inhibitor, e.g., an mTOR inhibitor described herein, such as, e.g., rapamycin, a rapamycin analog, OSI-027. The mTOR inhibitor can be, e.g., an mTORC1 inhibitor and/or an mTORC2 inhibitor, e.g., an mTORC1 inhibitor and/or mTORC2 inhibitor described herein. In some embodiments, the kinase inhibitor is a MNK inhibitor, e.g., a MNK inhibitor described herein, such as, e.g., 4-amino-5-(4-fluoroanilino)-pyrazolo [3,4-d] pyrimidine. The MNK inhibitor can be, e.g., a MNK1a, MNK1b, MNK2a and/or MNK2b inhibitor. The dual PI3K/mTOR inhibitor can be, e.g., PF-04695102.

[0650] In some embodiments of the methods or uses described herein, the kinase inhibitor is a CDK4 inhibitor selected from aloisine A; flavopiridol or HMR-1275, 2-(2-chlorophenyl)-5,7-dihydroxy-8-[(3S,4R)-3-hydroxy-1-methyl-4-piperidinyl]-4-chromenone; crizotinib (PF-02341066; 2-(2-Chlorophenyl)-5,7-dihydroxy-8-[(2R,3S)-2-(hydroxymethyl)-1-methyl-3-pyrrolidinyl]-4H-1-benzopyran-4-one, hydrochloride (P276-00); 1-methyl-5-[[2-[5-(trifluoromethyl)-1H-imidazol-2-yl]-4-pyridinyl]oxy]-N-[4-(trifluoromethyl)phenyl]-1H-benzimidazol-2-amine (RAF265); indisulam (E7070); roscovitine (CYC202); palbociclib (PD0332991); dinaciclib (SCH727965); N-[5-[[(5-tert-butyloxazol-2-yl)methyl]thio]thiazol-2-yl]piperidine-4-carboxamide (BMS 387032); 4-[[9-chloro-7-(2,6-difluorophenyl)-5H-pyrimido[5,4-d][2]benzazepin-2-yl]amino]-benzoic acid (MLN8054); 5-[3-(4,6-difluoro-1H-benzimidazol-2-yl)-1H-indazol-5-yl]-N-ethyl-4-methyl-3-pyridinemethanamine (AG-024322); 4-(2,6-dichlorobenzoylamino)-1H-pyrazole-3-carboxylic acid N-(piperidin-4-yl)amide (AT7519); 4-[2-methyl-1-(1-methylethyl)-1H-imidazol-5-yl]-N-[4-(methylsulfonyl)phenyl]-2-pyrimidinamine (AZD5438); and XL281 (BMS908662).

[0651] In some embodiments of the methods or uses described herein, the kinase inhibitor is a CDK4 inhibitor, e.g., palbociclib (PD0332991), and the palbociclib is administered at a dose of about 50 mg, 60 mg, 70 mg, 75 mg, 80 mg, 90 mg, 100 mg, 105 mg, 110 mg, 115 mg, 120 mg, 125 mg, 130 mg, 135 mg (e.g., 75 mg, 100 mg or 125 mg) daily for a period of time, e.g., daily for 14-21 days of a 28 day cycle, or daily for 7-12 days of a 21 day cycle. In some embodiments, 1, 2, 3, 4, 5, 6, 7, 8, 9, 10, 11, 12 or more cycles of palbociclib are administered.

[0652] In some embodiments of the methods or uses described herein, the kinase inhibitor is a BTK inhibitor selected from ibrutinib (PCI-32765); GDC-0834; RN-486; CGI-560; CGI-1764; HM-71224; CC-292; ONO-4059; CNX-774; and LFM-A13. In some embodiments, the BTK inhibitor does not reduce or inhibit the kinase activity of interleukin-2-inducible kinase (ITK), and is selected from GDC-0834; RN-486; CGI-560; CGI-1764; HM-71224; CC-292; ONO-4059; CNX-774; and LFM-A13.

[0653] In some embodiments of the methods or uses described herein, the kinase inhibitor is a BTK inhibitor, e.g., ibrutinib (PCI-32765), and the ibrutinib is administered at a dose of about 250 mg, 300 mg, 350 mg, 400 mg, 420 mg, 440 mg, 460 mg, 480 mg, 500 mg, 520 mg, 540 mg, 560 mg, 580 mg, 600 mg (e.g., 250 mg, 420 mg or 560 mg) daily for a period of time, e.g., daily for 21 day cycle, or daily for 28 day cycle. In some embodiments, 1, 2, 3, 4, 5, 6, 7, 8, 9, 10, 11, 12 or more cycles of ibrutinib are administered.

[0654] In some embodiments of the methods or uses described herein, the kinase inhibitor is a BTK inhibitor that does not inhibit the kinase activity of ITK, e.g., RN-486, and RN-486 is administered at a dose of about 100 mg, 110 mg, 120 mg, 130 mg, 140 mg, 150 mg, 160 mg, 170 mg, 180 mg, 190 mg, 200 mg, 210 mg, 220 mg, 230 mg, 240 mg, 250 mg (e.g., 150 mg, 200 mg or 250 mg) daily for a period of time, e.g., daily a 28 day cycle. In some embodiments, 1, 2, 3, 4, 5, 6, 7, or more cycles of RN-486 are administered.

[0655] In some embodiments of the methods or uses described herein, the kinase inhibitor is an mTOR inhibitor selected from temsirolimus; ridaforolimus (1R,2R,4S)-4-[(2R)-2 [(1R,9S,12S,15R,16E,18R,19R,21R,23S,24E,26E,28Z,30S,32S,35R)-1,18-dihydroxy-19,30-dimethoxy-15,17,21,23, 29,35-hexamethyl-2,3,10,14,20-pentaoxo-11,36-dioxa-4-azatricyclo[30.3.1.04° 9] hexatriaconta-16,24,26,28-tetraen-12-yl]propyl]-2-methoxycyclohexyl dimethylphosphinate, also known as AP23573 and MK8669; everolimus (RAD001); rapamycin (AY22989); simapimod; (5-{2,4-bis[(3S)-3-methylmorpholin-4-yl]pyrido[2,3-d]pyrimidin-7-yl}-2-methoxyphenyl)methanol (AZD8055); 2-amino-8-[trans-4-(2-hydroxyethoxy)cyclohexyl]-6-(6-methoxy-3-pyridinyl)-4-methyl-pyrido[2,3-d]pyrimidin-7(8H)-one (PF04691502); and N²-[1,4-dioxo-4-[[4-(4-oxo-8-phenyl-4H-1-benzopyran-2-yl)morpholinium-4-yl]methoxy]butyl]-L-arginylglycyl-L-α-aspartylL-serine- (SEQ ID NO: 692), inner salt (SF1126); and XL765.

[0656] In some embodiments of the methods or uses described herein, the kinase inhibitor is an mTOR inhibitor, e.g., rapamycin, and the rapamycin is administered at a dose of about 3 mg, 4 mg, 5 mg, 6 mg, 7 mg, 8 mg, 9 mg, 10 mg (e.g., 6 mg) daily for a period of time, e.g., daily for 21 day cycle, or daily for 28 day cycle. In some embodiments, 1, 2, 3, 4, 5, 6, 7, 8, 9, 10, 11, 12 or more cycles of rapamycin are administered. In some embodiments, the kinase inhibitor is an mTOR inhibitor, e.g., everolimus and the everolimus is administered at a dose of about 2 mg, 2.5 mg, 3 mg, 4 mg, 5 mg, 6 mg, 7 mg, 8 mg, 9 mg, 10 mg, 11 mg, 12 mg, 13 mg, 14 mg, 15 mg (e.g., 10 mg) daily for a period of time, e.g., daily for 28 day cycle. In some embodiments, 1, 2, 3, 4, 5, 6, 7, 8, 9, 10, 11, 12 or more cycles of everolimus are administered.

[0657] In some embodiments of the methods or uses described herein, the kinase inhibitor is an MNK inhibitor selected from CGP052088; 4-amino-3-(p-fluorophenylamino)-pyrazolo [3,4-d]pyrimidine (CGP57380); cercosporamide; ETC-1780445-2; and 4-amino-5-(4-fluoroanilino)-pyrazolo [3,4-d] pyrimidine.

[0658] In some embodiments of the methods or uses described herein, the kinase inhibitor is a dual phosphatidylinositol 3-kinase (PI3K) and mTOR inhibitor selected from 2-Amino-8-[trans-4-(2-hydroxyethoxy)cyclohexyl]-6-(6-methoxy-3-pyridinyl)-4-methyl-pyrido[2,3-d]pyrimidin-7(8H)-one (PF-04691502); N-[4-[[4-(Dimethylamino)-1-piperidinyl]carbonyl]phenyl]-N- [4-(4,6-di-4-morpholinyl-1,3,5-triazin-2-yl)phenyl]urea (PF-05212384, PKI-587); 2-Methyl-2-{4-[3-methyl-2-oxo-8-(quinolin-3-yl)-2,3-dihydro-1H-imidazo[4,5-c]quinolin-1-yl]phenyl}propanenitrile (BEZ-235); apitolisib (GDC-0980, RG7422); 2,4-Difluoro-N-{2-(methyloxy)-5-[4-(4-pyridazinyl)-6-quinolinyl]-3-pyridinyl}benzenesulfonamide (GSK2126458); 8-(6-methoxypyridin-3-yl)-3-methyl-1-(4-(piperazin-1-yl)-3-(trifluoromethyl)phenyl)-1H-imidazo[4,5-c]quinolin-2(3H)-one Maleic acid (NVP-BGT226); 3-[4-(4-Morpholinylpyrido[3,2,4,5]furo[3,2-d]pyrimidin-2-yl]phenol (PI-103); 5-(9-isopropyl-8-methyl-2-morpholino-9H-purin-6-yl)pyrimidin-2-amine (VS-5584, SB2343); and N-[2-[(3,5-Dimethoxyphenyl)amino]quinoxalin-3-yl]-4-[(4-methyl-3-methoxyphenyl)carbonyl]aminophenylsulfonamide (XL765).

[0659] In some embodiments of the methods or uses described herein, there may be a further administration of a protein tyrosine phosphatase inhibitor, e.g., a protein tyrosine phosphatase inhibitor described herein. In some embodiments, the protein tyrosine phosphatase inhibitor is an SHP-1 inhibitor, e.g., an SHP-1 inhibitor described herein, such as, e.g., sodium stibogluconate. In some embodiments, the protein tyrosine phosphatase inhibitor is an SHP-2 inhibitor.

[0660] In some embodiments of the methods or uses described herein, there may be a further administration of another agent, and the agent is a cytokine. The cytokine can be, e.g., IL-7, IL-15, IL-21, or a combination thereof. In another embodiment, the CAR molecule is administered in combination with a checkpoint inhibitor, e.g., a checkpoint inhibitor described herein. For example, in some embodiments, the check point inhibitor inhibits an inhibitory molecule selected from PD-1, PD-L1, CTLA-4, TIM-3, CEACAM (e.g., CEACAM-1, CEACAM-3 and/or CEACAM-5), LAG-3, VISTA, BTLA, TIGIT, LAIR1, CD160, 2B4, and TGFR beta.

[0661] In other embodiments of the methods or uses described herein, there may be a further administration of an agent that ameliorates one or more side effects associated with a cell expressing a CAR molecule. Side effects associated with the CAR-expressing cell can be chosen from cytokine release syndrome (CRS) or hemophagocytic lymphohistiocytosis (HLH).

[0662] The present invention also provides methods for preventing, treating and/or managing a disease associated with a cancer associated antigen as described herein-expressing cells (e.g., a hematologic cancer or atypical cancer expressing a cancer associated antigen as described herein), the method comprising administering to a subject a composition comprising a first population of mesoporous silica particles and a viral vector, and wherein the viral vector comprises an expression vector comprising a recombinant polynucleotide comprising an expression control sequence operatively linked to a nucleotide sequence that expresses a chimeric antigen receptor (CAR) that is engineered to target the tumor antigen. In some aspects, the subject is a human. Non-limiting examples of disorders associated with a cancer associated antigen as described herein-expressing cells include autoimmune disorders (such as lupus), inflammatory disorders (such as allergies and asthma) and cancers (such as hematological cancers or atypical cancers expressing a cancer associated antigen as described herein).

[0663] The present invention also provides methods for preventing, treating and/or managing a disease associated with a cancer associated antigen as described herein-expressing cells, the methods comprising administering to a subject a composition comprising a first population of mesoporous silica particles and a viral vector, and wherein the viral vector comprises an expression vector comprising a recombinant polynucleotide comprising an expression control sequence operatively linked to a nucleotide sequence that expresses a chimeric antigen receptor (CAR) that is engineered to target the tumor antigen. In some aspects, the subject is a human.

[0664] The present invention provides methods for preventing relapse of cancer associated with a cancer associated antigen as described herein-expressing cells, the methods comprising administering to a subject a composition comprising a first population of mesoporous silica particles and a viral vector, and wherein the viral vector comprises an expression vector comprising a recombinant polynucleotide comprising an expression control sequence operatively linked to a nucleotide sequence that expresses a chimeric antigen receptor (CAR) that is engineered to target the tumor antigen.

[0665] When “an immunologically effective amount,” “an anti-tumor effective amount,” “a tumor-inhibiting effective amount,” or “therapeutic amount” is indicated, the precise amount of the compositions of the present invention to be administered can be determined by a physician with consideration of individual differences in age, weight, tumor size, extent of infection or metastasis, and condition of the patient (subject).

[0666] In some aspects, it may be desired to administer activated immune effector cells (e.g., T cells, NK cells) to a subject and then subsequently redraw blood (or have an apheresis performed), activate and expand immune effector cells (e.g., T cells, NK cells) according to the present invention, and reinfuse the patient with these activated and expanded immune effector cells (e.g., T cells, NK cells). This process can be carried out multiple times every few weeks. In some aspects, immune effector cells (e.g., T cells, NK cells) can be activated from blood draws of from 10 cc to 400 cc. In some aspects, immune effector cells (e.g., T cells, NK cells) are activated from blood draws of 20 cc, 30 cc, 40 cc, 50 cc, 60 cc, 70 cc, 80 cc, 90 cc, or 100 cc.

[0667] The administration of the subject compositions may be carried out in any convenient manner, including by aerosol inhalation, injection, ingestion, transfusion, implantation or transplantation. The compositions described herein may be administered to a patient trans arterially, subcutaneously, intradermally, intratumorally, intranodally, intramedullary, intramuscularly, by intravenous (i.v.) injection, or intraperitoneally. In some aspects, the MSP (e.g., MSR) compositions of the present invention are administered to a patient by intradermal or subcutaneous injection. In some aspects, the T cell compositions of the present invention are administered parenterally. The term “parenteral” administration of an T cell composition includes, e.g., intrathecal, epidural, intracranial, subcutaneous (s.c.), intravenous (i.v.), intramuscular (i.m.), or intrasternal injection, intratumoral, or infusion techniques. In particular embodiments, the T cell composition is administered intravenously. In some embodiments, the compositions of MSPs (e.g., MSRs) and viral vectors may be injected directly into a tumor, lymph node, or site of infection.

### EXAMPLES

### Example A. Synthesis and Post-Functionalization of Mesoporous Silica Particles

[0668] Unless otherwise noted, all reagents were obtained from commercial sources and used as is.

[0669] 1. Exemplary Synthesis of Mesoporous Silica Particles

[0670] Poly(ethylene glycol)-block-poly(propylene glycol)-block-poly(ethylene glycol) avg Mn ˜5,800 (Pluronic P-123, 80.0 g, 487 mmol; Sigma) surfactant was dissolved in 3 L of 1.6M HCl at room temperature, heated to 40 degrees Celsius in a 5 L jacketed flask, and was mechanically stirred via and overhead stirrer at a rate of 0-600 rpm (but most commonly 300 rpm). Tetraethyl orthosilicate (TEOS, 184 mL, 826 mmol; Sigma) was added in one portion over <5 min and was heated at 40 degrees Celsius with maintained stirring for at least 2 hours but most commonly 20 hours. The resulting slurry was heated to 80-130 degrees Celsius (most commonly 100 degrees Celsius) for 6-72 hours (but most commonly 24 hours) for hydrothermal treatment before being cooled to room temperature. The slurry was filtered in a Buchner funnel and was washed with deionized water followed by ethanol and air dried at room temperature. The resulting silica material was calcined in a furnace with a slow ramp temperature from room temperature to 550 degrees Celsius over 8 hours and then maintaining at 550 degrees Celsius for another 8 hours before cooling to room temperature to afford 47 g of mesoporous silica particles.

[0671] Changes in the stir rate may have changes in the microparticle aspect ratio. Varying the conditions of the hydrothermal temperature and duration are common pore size controllers for mesoporous materials. For more information, see J. Chem. Educ. 2017, 94, 91-94 and references within.

[0672] Final mesoporous materials were characterized by light microscopy, Malvern Morphologi G3, scanning electron microscopy (SEM), thermal gravimetric analysis (TGA).

[0673] 2. Post-Modification of Silica Microparticles

### Example 2(a): Diethyl Ethylphosphonate Functionalized Microparticles

[0674] Diethyl ethylphosphonate functionalized silica microparticles were prepared by a modified method reported in New J. Chem., 2014, 38, 3853, with some modifications. Diethylphosphatoethyltriethoxysilane (4.15 mL, 13.03 mmol) was added to a slurry of 2.0 g of mesoporous silica microparticles suspended in 300 mL of toluene. The slurry was stirred and refluxed at 110 degrees Celsius for 14 hours before cooling to room temperature and filtered. The particles were washed with deionized water followed by ethanol and then dried in an oven at 100 degrees Celsius for 20 hours to afford diethyl ethylphosphonate functionalized particles.

### Example 2(b): Ethylphosphonic Acid Functionalized Microparticles

[0675] Ethylphosphonic acid functionalized microparticles were prepared by a modified method to the procedure reported in New J. Chem., 2014, 38, 3853. Trimethylsilylchlorosilane (1.388 mL, 10.86 mmol) was added to a slurry of 2.0 g of diethyl ethylphosphonate functionalized microparticles suspended in 150 mL of toluene and heated to 110 degrees Celsius for 24 hours. The slurry was cooled to room temperature and filtered, washing with dionized water and ethanol before drying in a oven at 100 degrees Celsius for 24 hours. The mesoporous silica particles were then suspended in 100 mL of 12M HCl and heated to 100 degrees Celsius for 18 hours. The slurry was cooled to room temperature, filtered and washed with deionized water and ethanol before drying in an oven at 100 degrees Celsius for 24 hours to afford ethylphosphonic acid functionalized microparticles.

### Example 2(c): Propylamine Functionalized Microparticles

[0676] Propylamine functionalized microparticles were prepared by a modified method to the procedure reported in Langmuir 2015, 31, 6457-6462. (3-aminopropyl)trimethoxysilane (3.05 ml, 19.54 mmol; APTMS, Sigma) was added to a slurry of 3.0 grams of mesoporous silica microparticles in 150 mL of reagent grade ethanol. The slurry was refluxed at 75 degrees Celsius for 7 hours. After cooling to room temperature and the slurry was filtered and the particles were washed with deionized water followed by ethanol and then dried in an oven at 100 degrees Celsius for 24 hours.

### Example 2(d): Biotin Functionalized Microparticles

[0677] (+)-Biotin N-succinimidyl ester (246 mg, 0.720 mmol) was added to a slurry of 1.0 g of propylamine-functionalized microparticles in 10.0 mL of pH 7.4 adjusted PBS buffer and stirred at room temperature for 18 hours. The slurry was filtered and washed with deionized water and ethanol before drying in an oven at 100 degrees Celsius for 24 hours to afford Biotin-functionalized microparticles.

### Example 2(e): Biotin-PEG4 Functionalized Microparticles

[0678] PEG4-Biotin N-hydroxysuccinimide (106 mg, 0.180 mmol; ThermoFischer EZ-Link NHS-PEG4-biotin) was added to a slurry of 0.25 g of propylamine-functionalized microparticles in 2.5 mL of pH 7.4 adjusted PBS buffer and stirred at room temperature for 18 hours. The slurry was filtered and washed with deionized water and ethanol before drying in an oven at 100 degrees Celsius for 24 hours to afford Biotin-PEG4 functionalized microparticles.

### Example 2(f): 3(2-Pyridyldithio)Propionamido)Hexanoate Functionalized Microparticles

[0679] Succinimidyl 6-(3(2-pyridyldithio)propionamido)hexanoate (112 mg, 0.360 mmol; LC-SPDP, ThermoFischer) was added to a slurry of 0.50 g of propylamine-functionalized microparticles in 2.5 mL of pH 7.4 adjusted PBS buffer and stirred at room temperature for 18 hours. The slurry was filtered and washed with deionized water and ethanol before drying in an oven at 100 degrees Celsius for 24 hours to afford 3(2-pyridyldithio)propionamido)hexanoate-functionalized microparticles.

### Example 2(g): 4-Oxo-4-(Propylamino)Butanoic Acid Functionalized Microparticles

[0680] Succinic anhydride (4 g, 40.0 mmol) was added to a slurry of 1.0 g of propylamine-functionalized microparticles in anhydrous DMF and was stirred at room temperature for 24 hours. The slurry was filtered and washed with deionized water and ethanol before drying in an oven at 100 degrees Celsius for 24 hours to afford 4-oxo-4-(propylamino)butanoic acid functionalized microparticles.

### Example 2(h): Propyldiethylenetriamine Functionalized Microparticles

[0681] Trimethoxysilylpropyldiethylenetriamine (1.678 mL, 6.51 mmol) was added to 1.0 g of mesoporous silica microparticles were suspended in 150 mL of reagent grade ethanol. The slurry was stirred at 75 degrees Celsius for 7 hours. After cooling to room temperature and the slurry was filtered and the particles were washed with deionized water followed by ethanol and then dried in an oven at 100 degrees Celsius for 20 hours to afford propyldiethylenetriamine functionalized microparticles.

### Example 2(i): 3-Propyldihydrofuran-2,5-Dione Functionalized Microparticles (Succinic Anhydride)

[0682] 3-(3-(triethoxysilyl)propyl)dihydrofuran-2,5-dione (4.94 mL, 17.37 mmol) was added to a slurry of 3.0 g of mesoporous silica microparticles in 300 mL of toluene. The slurry was heated to 110 degrees Celsius for 20 hours and was then cooled to room temperature, filtered and washed with dionizied water and ethanol. The functionalized microparticles were dried in an oven at 100 degrees Celsius for 24 hours.

### Example 2(j): Branched, Polyethylenimine Functionalized Microparticles

[0683] Polyethylenimine (25.1 g, 47.0 mmol; Branched, avg Mw ˜25,000, Sigma) was dissolved in 600 mL of anhydrous DMF and 6.0 g of 3-propyldihydrofuran-2,5-dione functionalized microparticles were added and stirred at room temperature for 20 hours. The slurry was filtered, and the particles were washed with deionized water followed by ethanol and then dried in an oven at 100 degrees Celsius for 20 hours to afford branched, polyethylenimine functionalized microparticles.

### Example 2(k): N,N,N-Trimethylpropan-1-Ammonium Functionalized Microparticles

[0684] Trimethoxysilylpropyltrimethylammonium chloride (3.61 mL, 6.51 mmol; 50% solution in methanol) was added to a slurry of 1.0 g mesoporous silica microparticles in 150 mL reagent ethanol and was heated to 75 degrees Celsius for 7 hours. After cooling to room temperature and the slurry was filtered and the particles were washed with deionized water followed by ethanol and then dried in an oven at 100 degrees Celsius for 20 hours to afford N,N,N-trimethylpropan-1-ammonium functionalized microparticles.

[0685] The procedure above was repeated at varying ratios of trimethoxysilylpropyltrimethylammonium chloride to silica microparticles (0.25 mmol trimethoxysilyltrimethylammonium chloride per gram of microparticles) to affect varying ratios of functional density.

### Example 2(1): Octyl Functionalized Microparticles

[0686] Triethyoxy(octyl)silane (2.05 mL, 6.51 mmol) was added to a slurry of 1.0 g mesoporous silica microparticles in 150 mL reagent ethanol and was heated to 75 degrees Celsius for 7 hours. After cooling to room temperature and the slurry was filtered and the particles were washed with deionized water followed by ethanol and then dried in an oven at 100 degrees Celsius for 20 hours to afford octyl functionalized microparticles.

### Example 2(m): Hexadecyl Functionalized Microparticles

[0687] Hexadecyltrimethoxysilane (2.54 mL, 6.51 mmol) was added to a slurry of 1.0 g mesoporous silica microparticles in 150 mL reagent ethanol and was heated to 75 degrees Celsius for 7 hours. After cooling to room temperature and the slurry was filtered and the particles were washed with deionized water followed by ethanol and then dried in an oven at 100 degrees Celsius for 20 hours to afford hexadecyl functionalized microparticles.

### Example 2(n): 11-Azidoundecyl Functionalized Microparticles

[0688] (11-azidoundecyl)trimethoxysilane (1.0 g, 3.15 mmol) was added to a slurry of 1.0 g mesoporous silica microparticles in 150 mL reagent ethanol and was heated to 75 degrees Celsius for 7 hours. After cooling to room temperature and the slurry was filtered and the particles were washed with deionized water followed by ethanol and then dried in an oven at 100 degrees Celsius for 20 hours to afford 11-azidoundecyl functionalized microparticles.

### Example 2(o): 3-Azidopropyl Functionalized Microparticles

[0689] (3-azidopropyl)trimethoxysilane (1.0 g, 4.87 mmol) was added to a slurry of 1.0 g mesoporous silica microparticles in 150 mL reagent ethanol and was heated to 75 degrees Celsius for 7 hours. After cooling to room temperature and the slurry was filtered and the particles were washed with deionized water followed by ethanol and then dried in an oven at 100 degrees Celsius for 20 hours to afford 3-azidopropyl functionalized microparticles.

### Example 2(p): 3,3,4,4,5,5,6,6,7,7,8,8,8-Tridecafluorooctyl Functionalized Microparticles

[0690] Triethoxy(3,3,4,4,5,5,6,6,7,7,8,8,8-tridecafluorooctyl)silane (2.499 mL, 6.51 mmol) was added to a slurry of 1.0 g mesoporous silica microparticles in 150 mL reagent ethanol and was heated to 75 degrees Celsius for 7 hours. After cooling to room temperature and the slurry was filtered and the particles were washed with deionized water followed by ethanol and then dried in an oven at 100 degrees Celsius for 20 hours to afford 3,3,4,4,5,5,6,6,7,7,8,8,8-tridecafluorooctyl functionalized microparticles.

### Example B. Testing MSR Surface Modifications for Virus Binding

[0691] To test the binding of lentivirus to MSPs, a variety of MSPs was prepared with varying surface chemistries (FIG. 1). Dry MSR batches were resuspended at 10 mg/ml in ice-cold Tris-NaCl-EDTA buffer pH 7.5 (NTE buffer). A stock solution of green fluorescent protein (GFP) expressing lentivirus (FCT067, Kerafast) was diluted in ice-cold NTE buffer to a titer of 3×10⁶/ml. The MSR suspension and the diluted virus were combined at ratios of 1:1 vol/vol and incubated on ice for 30 minutes. Control particles were incubated 1:1 vol/vol with NTE buffer without virus. Following the incubation, samples were washed once with 1% bovine serum albumin (BSA) in phosphate buffered saline (PBS) at 4° C., and then with PBS at 4° C. Samples were then fixed with 4.2% paraformaldehyde in PBS. Samples were stained with an antibody against the viral envelope (anti-VSV-G from Kerafast, 8G5F11; 1:50 dilution) followed by an anti-mouse IgG labeled with Dylight-488 (Invitrogen). Samples were washed twice with PBS and imaged using an Evos fluorescent microscope equipped with a GFP LED light cube (FIG. 2). Imaging showed no detectable binding of the staining reagents to MSRs bearing no virus. Virus-conjugated rods show varying levels of quantitative binding, with the trimethylammonium and amine functionalities showing maximum binding.

### Example C. In Vitro Assay for T Cell Transduction with GFP Lentivirus Using MSR

[0692] A schematic representation of the use of MSRs for virus transduction of T cells is shown in FIG. 3. Naïve human T cells were stimulated with Dynabead T cell activator beads at a 3:1 bead:cell ratio for two days. Beads were removed using a magnet, and cells were transferred to fresh culture medium. Virus-conjugated MSRs were prepared as noted above and resuspended at 80 μg/ml in cell culture medium. Serial dilutions of this were made as indicated in FIG. 3. This suspension was combined 1:1 with T cells 5×10⁵/ml and incubated for four days. GFP expression was assessed in live, singlet, cells in culture to assess the transduction efficiency. Results (FIG. 4) indicate that the transduction of MSR-conjugated virus occurred at greater levels than virus given in culture media only. The trimethylammonium functionalized MSRs provided the highest level of transduction.

### Example D. Interaction of T Cells with MSRs Presenting CD3/CD28 Agonistic Antibodies, EGFRvIII Peptides, or BCMA Protein

[0693] MSRs with surface-immobilized ligands were prepared as described in Cheung, A. S., et al., Scaffolds that mimic antigen-presenting cells enable ex vivo expansion of primary T cells. Nature Biotechnology, 36(2), 160-169. A schematic of this process is shown in FIG. 5.

[0694] Briefly, liposomes primarily composed of POPC with 1 mol % PE-biotin were formed using a thin film rehydration method and extrusion through a 100 nm polycarbonate membrane. Hydroxyl functionalized MSRs were incubated with the liposomes to allow the formation of a supported lipid bilayer on the MSR surface (FIG. 6). To functionalize the MSRs with CD3 and CD28 agonistic antibodies, MSRs were washed several times with PBS, incubated with streptavidin, and then tethered with biotinylated CD3 and CD28 antibodies. For MSR-immobilization of EGFRvIII CAR-binding peptides, a biotinylated EGFRvIII CAR-binding peptide was used (FIG. 7). For BCMA CART stimulation, recombinant BCMAFc protein was biotinylated using biotin-NHS and similarly coupled to the MSR surface.

[0695] After incubation with the desired ligands, MSRs were washed several times with PBS and resuspended in culture medium at various concentrations and incubated with T cells. T cell proliferation was read out using CFSE labeling of the T cells and assessing dye dilution by flow cytometry. Cytokine production was assessed using a multiplex cytokine analysis method (Mesoscale Delivery V-Plex).

[0696] EGFRvIII CARTs produced interferon gamma and IL-2 in response to EGFRvIII CAR-binding peptide bound to the surface of the MSRs, while free EGFRvIII CAR-binding peptide in solution, a non-stimulating peptide (OVA) presented on the MSRs, or undecorated MSRs gave no response from the CARTs (FIG. 8). In another experiment, the proliferation of EGFRvIII CARTs were monitored in response to various stimuli using cell counting (FIG. 9).

[0697] To further analyze the phenotype expansion of different T cell subsets, proliferation of EGFRvIII CARTs was assessed using flow cytometry. CARTs were stained with CFSE and monitored for dye dilution to indicate proliferation by flow cytometry (FIG. 10). Similar experiments were conducted using MSRs functionalized with BCMAFc protein antigen present on the MSR surface (FIG. 11).

[0698] To test the simultaneous stimulation and transduction of T cells with virus using two types of MSRs (MSRs bearing stimulatory cues, and MSRs mixed with lentivirus), the experimental schema shown in FIG. 12 was used. One population of MSRs were coated with a lipid bilayer and grafted with anti-CD3/CD28 antibodies as described above. A second population of MSRs were incubated with lentivirus. Results shown in FIG. 13 indicated a superior transduction level when T cells were stimulated with anti-CD3/CD28 agonistic antibodies and were exposed to virus that was incubated with PEI-MSRs compared to free virus in solution.

[0699] To test the simultaneous stimulation and transduction of T cells with both cues on the same population of MSRs, T cells were exposed to either (1) anti-CD3/CD28 agonistic antibody-bearing lipid-coated stimulating MSRs, and virus in media, (2) anti-CD3/CD28 agonistic antibody-bearing lipid-coated stimulating MSRs, and PEI-MSRs pre-incubated with virus, or (3) PEI MSRS adsorbed with anti-CD3/CD28 agonistic antibodies, and then incubated with virus. After three days of culture, T cells were assessed for transduction efficiency. FIG. 14 shows the effect of stimulatory MSR concentration on the MSRs of conditions (1) and (2) above at various amounts of virus. As shown in the FIG. 14, overall transduction is enhanced under condition (2) where PEI-MSRs are incubated with virus.

[0700] FIG. 15 compares all three conditions, where conditions (1) and (2) are at the highest concentration of stimulatory MSRs. As seen in FIG. 15, condition (3) where stimulatory cues are bound to the PEI-MSRs produces the highest relative transduction efficiency. The same formulations were used to study MSR-mediated transduction with human peripheral blood mononuclear cells (PBMCs). In FIG. 16, the transduction in various cell populations as a function of virus concentration is shown at the highest level of stimulation for conditions (1) and (2). FIG. 17 shows the proportion of each cell population present in the total GFP+ transduced cell fraction, and in the total cell population collected at the highest level of stimulation for conditions (1) and (2).

### Example E. In Vivo Study of MSR Induced T Cell Transduction

[0701] A composition of mesoporous silica particle conjugated to viral vectors is injected under the skin of mice. Approximately 5-7 days later, MSRs adsorbed with a virus encoding an anti-mouse CD19 CAR is injected at this site. The depletion of CD19+B cells in the blood of mice will be monitored as an indication that anti-CD19 CARTs have been generated. The presence of these CARTs is confirmed in the blood and bone marrow. Detailed histological assessment of the injection site as well as draining lymph nodes, the spleen, and liver, using in situ hybridization for the CAR transgene is conducted to assess the leakage of the virus to unwanted sites.

### Example F. Drug Loading onto Mesoporous Silica Microparticles

[0702] A variety of drugs may be loaded onto the mesoporous silica microparticles.

[chemical structure]

### 1. Example 1: Loading of TLR7 Agonist onto Mesoporous Silica Microparticles

[0703] A solution of Imiquimod, in chloroform is added to a slurry of 100 mg silica microparticles in 2.0 mL chloroform (a concentration of 100-500 μg of imiquimod per 10 mg of mesoporous silica particles) and shake at 500 rpm at 40 degrees Celsius for 72 hours. The MSPs are centrifuged at 1000 rpm for 3 min and the remaining solution is removed. The MSPs are washed with 2.0 mL of chloroform followed by centrifugation and removal of the supernatant. The wash steps are repeated with ethanol to remove excess and unabsorbed imiquimod. The final microparticles are slurried in water and lyophilized.

### 2. Example 2: In Vitro Drug Release from Mesoporous Silica Particles

[0704] 10.0 mg (or the equivalent of 300 μg of drug-loaded material) drug-loaded MSPs are suspended in 1.0 mL of pH 7.4 (0.0067M) phosphate buffer and left at 37 degrees Celsius. Samples are collected at 1 h, 3 h, 6 h, 24 h, 2 days, and 5 days; analysis of these samples is performed by UPLC and plotted to a standard analytical curve. Supernatant is removed and replaced with fresh buffer at each timepoint.

[0705] The foregoing written specification is considered to be sufficient to enable one skilled in the art to practice the invention. The present invention is not to be limited in scope by the constructs deposited, since the deposited embodiments are intended to illustrate only certain aspects of the invention and any constructs that are functionally equivalent are within the scope of this invention. The deposit of material herein does not constitute an admission that the written description herein contained is inadequate to enable the practice of any aspect of the invention, including the best mode thereof, nor is it to be construed as limiting the scope of the claims. Indeed, various modifications of the invention in addition to those shown and described herein will become apparent to those skilled in the art from the foregoing description and fall within the scope of the appended claims.

[0706] It is understood that the application of the teachings of the present invention to a specific problem or situation will be within the capabilities of one having ordinary skill in the art in light of the teachings contained herein.

[0707] The disclosures of each and every citation in the specification are expressly incorporated herein by reference.

### Example G. In Vivo Study of MSR Induced CAR-T Generation

[0708] Mice engrafted with human T cells and B cells (human CD34+ stem cell humanized mice or human peripheral blood mononuclear cell-injected mice) are established using known methods. A composition of mesoporous silica particle conjugated to CAR19 lentivirus is injected under the skin of mice to transduce T cells. The presence of CAR19-expressing T cells (using anti-CAR19 idiotype antibody staining) and the depletion of CD19+B cells in the blood of mice treated with MSR-CAR19 lentivirus conjugates is monitored using flow cytometry on serial blood collection samples (day 0 pre-injection and twice weekly between day 1 to day 21 following MSR-virus injection) and compared to control mice injected with MSR-GFP lentivirus as an indication that anti-CD19 CARTs have been generated and are functional in killing their target. The concentration of human interferon-gamma and tumor necrosis factor alpha is determined from the same blood samples as a second biomarker for CD19 CAR T cell generation and activation. Detailed histological assessment of the injection site as well as lymph nodes, bone marrow, the spleen, and liver using in situ hybridization for the CAR transgene is conducted to assess the leakage of the virus to unwanted sites and study trafficking of the generated CAR19 T cells to these sites.

[0709] In another experiment, human T and B cell-containing mice are intravenously injected with a CD19-expressing Nalm6 leukemia tumor that expresses a luciferase reporter gene. Cohorts of mice are injected under the skin with a single injection of a composition of mesoporous silica particles conjugated to CAR19 or GFP lentivirus from 7 days before to 7 days following tumor injection to transduce T cells. The Nalm6 tumor burden is monitored by luciferase signal on IVIS imaging to study anti-tumor efficacy of the generated anti-CD19 CARTs. The presence of CAR19-expressing T cells and the depletion of CD19+B cells in the blood of mice treated with MSR-CAR19 lentivirus conjugates is monitored on serial blood collection samples (day 0 pre-injection and twice weekly between day 1 to day 21 following MSR-virus injection) and compared to control mice injected with MSR-GFP lentivirus. The concentration of human interferon-gamma and tumor necrosis factor alpha is determined from the same blood samples as a second biomarker for CD19 CAR T cell generation and activation.

[0710] These studies are repeated with MSR-lentivurs conjugates for other cancer/tumor targets, including but not limited to BCMA, CD20, CD22, CD123, EGFRvIII, CLL-1, and combinations thereof (with each other and/or CD19).

### Example H: Functional Analysis of Compositions Comprising a Cryogel Comprising VEGF-C and MSRS with Conjugated Viral Vector and Absorbed Cell Activation Agent

### Example 1: Generation of VEGF-C

[0711] HEK Production

[0712] DNA was synthesized at GeneArt (Regensburg, Germany) and cloned into a mammalian expression vector using restriction enzyme-ligation based cloning techniques. The resulting plasmid was transfected into HEK293T cells. For transient expression of proteins, vectors for wild-type or engineered variants were transfected into suspension-adapted HEK293T cells using Polyethylenimine (PEI; Cat #24765 Polysciences, Inc.). The recombinant expression vectors were then introduced into the host cells and the construct produced by further culturing of the cells for a period of 7 days to allow for secretion into the culture medium.

[0713] The produced constructs were then purified from cell-free supernatant, using immobilized metal ion affinity chromatography (IMAC).

[0714] His-tagged proteins were captured by IMAC. The resin was washed before the protein was eluted.

[0715] Finally, eluted fractions were polished by using size exclusion chromatography (allowing separation of aggregates, monomers and dimers. Purification analysis was done using SDS-PAGE and aggregation content was determined using analytical size exclusion chromatography method.

TABLE 21
Production yield of VEGF-C variants in HEK293T cell line

| | Physical | Final yield after IMAC |
|---|---|---|
| Variant | state | and SEC (ug/L) |
| 1 | Dimer | 117 |
| 2 | Dimer | 405 |
| | Monomer | 714 |
| 7 | Dimer | 1120 |
| | Monomer | 623 |
| 8 | Dimer | 1190 |
| 9 | Dimer | 869 |
| | Monomer | 125 |

[0716] CHO Production

[0717] A CHO MaKO manufacturing expression system was used to produce VEGF-C variant 8. The gene encoding the target protein was introduced into an expression cassette driven by a CMV promoter in a plasmid expression vector. The vector was transfected in triplicate into CHO MaKO cells. For each transfection, 0.5 μg of plasmid were transfected into viable cells in medium. The transfected cells were seeded into cell culture medium with low concentration of folic acid in shake flasks. Cells were grown in a humidified shaker incubator. On day 3 post transfection, selection for stable transfectants was started. The cells went into a selection crisis and recovered within 21 days. Then vials of the selected stable pools were frozen.

[0718] For production of the VEGF-C variant 8 a fed-batch approach was used. A vial of the frozen cells was thawed. After recovery from thawing, cells were seeded into production cell culture medium in shake flasks. Cultures were grown in a humidified shaker incubator. Growth temperature was decreased on day 5 after seeding the culture. Feed solutions were added on day 3, 4, 5, 6, 7 and 10 after seeding. The culture was harvested on day 11 after seeding. Cells were separated from the cell culture medium by centrifugation and sterile filtering. The target protein was purified from the clarified cell culture supernatant and characterized as above.

TABLE 22
Production yield of VEGF-C variant 8 in CHO MaKO cell line

| | Physical | Final yield after IMAC |
|---|---|---|
| Variant | state | and SEC (mg/L) |
| 8 | Dimer | 17.5 |

### Example 2: Generation of Cryogel

[0719] Alginate conjugations were formulated based on a previously described protocol (Koshy et al. 2018).

[0720] Norbornene Alinate (Alg-Nb)

[0721] One gram of Pronova UP MVG alginate was dissolved in 100 ml of 0.1 M 2-(N-morpholino)ethanesulfonic acid (MES) buffer overnight at room temperature under constant stirring. 280 μl of 5-norbornene-2-methylamine (norbornene) was then added to the alginate solution. 1464 mg of 1-ethyl-3-(3-dimethylaminopropyl)-carbodiimide hydrochloride (EDC) and 1085 mg of N-hydroxysuccinimide (NHS) were separately dissolved in 20 ml of MES buffer and added to the alginate-norbornene solution and allowed to react for 24 hours at room temperature. After 24 hours the solution was dialyzed in sequential 5 L salt baths (7, 6, 5, 4, 3, 2, 1, 0, 0, 0 g/L NaCl) for 3 hours at each concentration. Solution was then filtered twice (0.22m vacuum) and frozen at −80 C overnight. Frozen solutions were then lyophilized for 5 days and stored at −20 C until use in experiments.

[0722] Tetrazine Alinate (Alg-Tz)

[0723] One gram of Pronova UP MVG alginate was dissolved in 0.1 M 2-(N-morpholino)ethanesulfonic acid (MES) buffer overnight at room temperature under constant stirring. 126 mg of (4-(1,2,4,5-tetrazin-3-yl)phenyl methanamine hydrochloride (tetrazine) was then added to the alginate solution. 1464 mg of 1-ethyl-3-(3-dimethylaminopropyl)-carbodiimide hydrochloride (EDC) and 1085 mg of N-hydroxysuccinimide (NHS) were separately dissolved in 20 ml of MES buffer and added to the alginate-tetrazine solution and allowed to react for 24 hours at room temperature. After 24 hours, solution was quenched with 311 mg of hydroxylamine for 30 min and centrifuged at maximum RPM for 10 minutes. Solution was then filtered (0.22 uM filter) and dialyzed in sequential 5 L salt baths (7, 6, 5, 4, 3, 2, 1, 0, 0, 0 g/L NaCl) for 3 hours at each concentration. Solution was then filtered twice (0.22 uM filter) and frozen at −80 C overnight. Frozen solutions were then lyophilized for 5 days and stored at −20 C until use in experiments.

[0724] Cryogel Formulation (FIG. 21A)

[0725] Alg-Tz and Alg-Nb were dissolved in DIH₂O at 20 mg/ml with a Thermomixer (37 C, 2000 rpm) for 1 hour. Separately, laponite was dissolved for 1 hour at 5 mg/ml concentration in DI-H₂O under constant mixing at room temperature. Solutions were then filtered (0.22 uM filter) under sterile conditions. VEGF-C(3 mg/ml stock) and laponite (Laponite XLG) (5 mg/ml stock) solutions were incubated together at room temperature for 1 hour. Alg-Tz solution and Alg-Nb solutions were then added in a 1:1 ratio and diluted to a final concentration of 10 mg/ml (0.25 mg/ml final concentration of laponite, 10 μg VEGF-C/gel). 50 ul of mixture was immediately pipetted into PEEK molds and frozen at −20 C overnight. Prior to injection, gels were thawed at room temperature in the molds and then placed into 16ga syringe needles. Needles with gels were then placed on 1 ml syringes with 100 ul of sterile PBS.

### Example 3: VEGF-C Release Analysis

[0726] In Vitro VEGF-C Release Assay from Alginate Cryogels (FIG. 21)

[0727] VEGF-C cryogels (10 μg protein+0.25 mg/ml laponite) were incubated at 37 C in 1 ml of release buffer (1% BSA solution in PBS). Release buffer was completely removed and replaced at various timepoints throughout the experiment. Samples of release buffer were stored at −80 C until thawed for use in a VEGF-C ELISA.

### Example 4: MSR Synthesis

[0728] Poly(ethylene glycol)-block-poly(propylene glycol)-block-poly(ethylene glycol) avg Mn ˜5,800 (Pluronic P-123, 80.0 g, 487 mmol; Sigma) surfactant was dissolved in 3 L of 1.6M HCl at room temperature, heated to 40 C in a 5 L jacketed flask, and mechanically stirred via and overhead stirrer at a rate of 0-600 rpm. Tetraethyl orthosilicate (TEOS, 184 mL, 826 mmol; Sigma) was added in one portion over <5 min and was heated at 40 C with maintained stirring for at least 2 hours but most commonly 20 hours. The resulting slurry was heated to 80-130 C for 6-72 hours for hydrothermal treatment before being cooled to room temperature. The slurry was filtered in a Buchner funnel and was washed with deionized water followed by ethanol and air dried at room temperature. The resulting silica material was calcined in a furnace with a slow ramp temperature from room temperature to 550 C over 8 hours and then maintaining at 550 C for another 8 hours before cooling to room temperature to afford 47 g of mesoporous silica particles.

[0729] Changes in the stir rate may have changes in the microparticle aspect ratio. Varying the conditions of the hydrothermal temperature and duration are common pore size controllers for mesoporous materials.

[0730] Final mesoporous materials were characterized by light microscopy, Malvern Morphologi G3, scanning electron microscopy (SEM), thermal gravimetric analysis (TGA).

[0731] N,N,N-Trimethylpropan-1-Ammonium Functionalized Microparticles

[0732] Trimethoxysilylpropyltrimethylammonium chloride (3.61 mL, 6.51 mmol; 50% solution in methanol) was added to a slurry of 1.0 g mesoporous silica microparticles in 150 mL reagent ethanol and was heated to 75 degrees Celsius for 7 hours. After cooling to room temperature and the slurry was filtered and the particles were washed with deionized water followed by ethanol and then dried in an oven at 100 degrees Celsius for 20 hours to afford N,N,N-trimethylpropan-1-ammonium functionalized microparticles, referred to herein as “trimethylammonium MSRs”.

[0733] MSR Size Reduction

[0734] Stock MSR variants were roughly 100-200 μm in length after synthesis. To improve injectability through a 28.5 ga insulin syringe, dry MSRs were homogenized in a MP FastPrep-24 5G bead beating grinder and lysis system for 80 seconds (FIG. 30). MSRs were then autoclaved and stored at room temperature until used in experiments.

[0735] Loading of Lentivirus onto MSRs and Characterization of Complex

[0736] Homogenized MSR batches were resuspended at 10 mg/ml in ice-cold Tris-NaCl-EDTA buffer pH 7.5 (NTE buffer). The desired lentivirus stock was diluted in ice-cold NTE buffer to the desired total amount of transducing units (TU) for loading. The MSR suspension and the diluted virus were combined at ratios of 1:1 vol/vol and incubated on ice for 30 minutes. At least two wash steps in excess DPBS were performed to remove excess virus prior to functional in vitro tests, or in vivo use. For loading and retention studies (FIGS. 27-28), a 2.5 mg/ml MSR suspension was mixed 1:1 with of a solution containing the indicated amount of virus in the figures and incubated for 30 minutes on ice. Virus amounts in loading solutions, bound to the MSRs, and released from the MSRs was quantified using a commercially available kit. For release studies, the MSR-lentivirus complex was incubated in the media at 37 C, and the supernatant was collected at the indicated timepoints for qPCR analysis.

[0737] MSR Loading with Virus and STARTERS for In Vivo Use

[0738] Construct 2 (Table 20, FIG. 48A-48B) and trimethylammonium MSRs were co-incubated to allow adsorption of the cell activation agent onto the MSR surface. Construct 2 was added to 1 an 8 mg/ml trimethylammonium MSR suspension and incubated for 1 hour at 4 C. Loaded MSRs were washed three times and resuspended in DPBS to a final concentration of 15 mg/ml MSRs.

[0739] NTE buffer solution containing CD19 CAR encoding (also referred to as CAR19) lentivirus was mixed with a 10 mg/ml trimethylammonium MSR suspension and incubated for 30 minutes at 4 C. MSRs were washed twice and resuspended in DPBS to a final concentration of 15 mg/ml MSRs.

[0740] Finally, MSRs were vigorously pipetted up and down, back loaded into insulin syringes, and immediately injected intradermally into mice.

### Example 5: Transduction of Cells and Functional Testing

[0741] In Vitro T Cell Transduction

[0742] Human T cells were isolated from leukopaks using the Miltenyi Human Pan T cell isolation kit and frozen prior to use. Cells were thawed and plated in complete OpTmizer medium in the presence of the format 4 construct (Table 20, FIGS. 48A-48B). CD19 CAR encoding (also referred to as CAR19) virus, either as free virus or MSR-virus complexes were added into the culture, followed by one day of incubation. Cells were washed and plated for a further three days prior to use in characterization and functional tests (FIG. 29-30).

[0743] CAR T Cell Characterization and Functional Testing (FIG. 29)

[0744] CAR T cells were analyzed for expression of the CAR receptor by staining with a CD19 CAR anti-idiotype antibody conjugated to PE and analysis by flow cytometry. Nalm6 (RRID: CVCL_0092) is a human acute lymphoblastic leukemia (ALL) cell line. Cells were grown in RPMI medium containing 10% fetal bovine serum and both grow in suspension. Cells were modified to express luciferase (Nalm6-Luc), so that their presence in co-cultures could be assessed by luciferase signal. Nalm6-Luc cells were co-cultured at various cellular ratios with CD19-CARTs produced using free virus of MSR-virus complexes (FIG. 29). The luciferase signal at the end of a 1-day coculture was used to calculate the percentage of input Nalm6 that had been killed by the CARTs. Interferon-gamma levels in the supernatant at the end of the co-culture were quantified using a commercially available kit.

### Example 6: Analysis of Results

[0745] Tube Assay (FIG. 20)

[0746] Human Dermal Lymphatic Endothelial Cells (HDLECs) were seeded (p0) and passaged at 75% confluence until p4 or enough cells were obtained for experiments. One ml was then aliquoted into Eppendorf tubes, treated with 600 μg of VEGF-C protein, and vortexed. Each treatment was added to warmed media in a 6 well plate and incubated overnight at 37 C (5% CO₂). For imaging analysis cells were washed and then fixed with 3.7% formalin-0.05% Triton X-100 solution (fixing buffer), then washed and coated with 0.1% Triton X-100 solution (permeabilization buffer). After washing twice with PBS cells were coated with 0.05% Triton X-100 in 1% BSA solution (blocking buffer). DAPI and phalloidin staining was performed according to known protocols. After staining cells were washed twice with PBS and imaged.

[0747] Proliferation Assay (FIG. 20)

[0748] WST-8 media was prepared by diluting WST-8 solution 1:10 into MV media. Culture media was removed, and cells were incubated in WST-8 media. Following incubation, media was removed in triplicate from each well and added to a 96 well plate. Absorbance of each well at 450 nm was read using a spectrophotometer.

[0749] Tissue Processing after In Vivo Experiments

[0750] Tissues were harvested from mice, weighted, and cut into very fine pieces with scissors. Samples were then enzymatically digested under constant stirring in of digestion media containing collagenase 4 and DNAse 1. Samples were then pipetted up and down. Following pipetting, digestion media containing collagenase D and DNAse 1 was added to the samples. Samples were pipetted up and down for 3 cycles. EDTA was added (5 mM) and cells were filtered through 70 μm filters and 40 uM mesh and resuspended in Fc blocking buffer. Cells were washed and stained for FACS analysis.

[0751] H&E and ISH Staining (FIGS. 32-33)

[0752] Skin/cryogel tissues, adjacent skin and draining lymph node were collected at necropsy, submersion fixed in 10% neutral buffered formalin and processed to paraffin. Sections were stained with hematoxylin and eosin (H&E) for histological evaluation. In situ hybridization to detect CAR transcript as well as Hs-PPIB (positive control and tissue quality control) and DAPB (negative control) genes was performed on formalin fixed paraffin embedded tissue sections. Positive PPIB and negative DAPB control probe sets were included to optimize preconditioning and ensure mRNA quality and specificity, respectively. The hybridization method followed known protocols using a 3,3′-Diaminobenzidine (DAB) chromogen. Briefly, 5 μm thick tissue sections were placed on glass slides, baked for 60 minutes and used for hybridization. The deparaffinization and rehydration protocol was performed using a stainer. Off-line manual pretreatment in 1×retrieval buffer was conducted. Optimization was performed by first evaluating PPIB and DAPB hybridization signal and subsequently using the same conditions for all slides. Following pre-treatment, the slides were transferred to a autostainer to complete the hybridization procedure including protease pretreatment; hybridization followed by amplification; and detection with HRP and hematoxylin counter stain. Slides were digitalized using a slide scanner and representative images captured.

[0753] Further Results

[0754] Cryogels (0.25 mg/ml laponite) containing 10 μg of different VEGF-C constructs were injected superficially into the dermis mice (N=5/group) at day 0. At day 14 mice were euthanized and the skin/cryogel (combined) were dissected for digestion and FACS analysis. Representative FACS plots of LECs (CD31⁺, PDPN⁺) are pre-gated on FSC-A/SSC-A, and CD45⁻ (FIG. 22). The results of FIG. 23 bear on the delivery of VEGF-C. Mice were injected with VEGF-C (N=12) or blank cryogels (N=10) synthesized as previously mentioned. Skin/gels from mice were harvested at timepoints day 7, 14, and 21, digested, and stained for FACS. LECs were gated on CD45⁻ CD31⁺ PDPN⁺. BECs were gated on CD45⁻ CD31⁺ PDPN⁻. CD4 and CD8 T Cells were gated on CD45⁺ CD11b⁻CD11c⁻Thy1⁺.

[0755] In FIG. 25A C57B16 Mice were injected with either VEGF-C cryogels (N=5) or blank cryogels (N=5) and evaluated for lymphangiogenesis at day 14. Additionally, NSG mice were injected with VEGF-C cryogels (N=5) to compare LEC proliferation between immunocompetent mice (C57B16) and immune-compromised mice (NSG). For FIG. 25B, NSG mice were injected on day 0 with either VEGF-C cryogels (N=5) or blank cryogels (N=5). On day 10, all mice were injected with PBMCs via their lateral tail vein. Seven days after PBMC injection skin/gel tissue was collected for digestion and FACS analysis. LECs were gated from human CD45⁻ mouse CD11b⁻ mouse CD31⁺ mouse PDPN⁺. CD4 and CD8 T cells were gated from human CD45⁺ mouse CD11b⁻ human CD3⁺. B Cells were gated human CD45⁺ mouse CD11b⁻ human CD3⁻ human CD19+.

[0756] In FIG. 34, NSG mice (N=45) were injected with VEGF-C cryogels at day 0 and PBMCs at day 10 via tail vein injection. At day 17 mice were intradermally injected with either 1) PBS (N=15 total/5 for endpoint FACS analysis), 2) MSR with Construct 2 (10 μl, injection of 15 mg/ml MSR equivalent) followed by free CD19 CAR encoding lentivirus (10 μl injection containing 4.26e6 TU of virus at 1 hour post STARTERS injection) (N=15 total/6 for endpoint FACS analysis) or 3) MSR bound CD19 CAR encoding lentivirus mixed 1:1 with MSR with Construct 2 (20 ul single injection of 15 mg/ml MSRs) (N=15 total/5 for endpoint FACS analysis). On day 14, 3 or 4 mice group mice were euthanized and analyzed for lymphangiogenesis in the skin/gel area, while on day 20 and 35, mice were euthanized and skin/gel and spleen were collected for histological analysis to look for local and systemic transduced cells (N=3/group/timepoint). Mice were periodically bled for FACS analysis of circulating CD19 CAR+ cells (D25, 30, 35). Finally, mice were euthanized for FACS analysis of skin/gel and spleen on day 35 to look for CART expansion and B cell depletion.

### Example I: Functional Analysis of In Vivo CART Manufacturing

### Summary

[0757] This Example describes an in vivo CART manufacturing process involving localized delivery of a cell recruitment factor to induce lymphangiogenesis and/or attract T cells, e.g., naïve T cells, that can be subsequently activated and transduced with a viral vector encoding a CAR to generate functional CART cells in vivo (FIG. 18). In some embodiments, a subject is administered (for example, locally) a cell recruitment factor via a cryogel, wherein the cell recruitment factor is VEGF-C(e.g., a slow-releasing VEGF-C protein cryogel formulation). Without wishing to be bound by theory, release of VEGF-C induces lymphangiogenesis of pre-existing skin lymphatic capillaries, activating lymphatic endothelial cells (LECs). The activated LECs secrete chemokines such as CCL21, which in turn recruit immune cells, e.g., naïve T cells, to the site of administration, e.g., to the site in the dermis on top of the gel. In some embodiments, after a period of 7 to 21 days, e.g., 14 days, the subject is administered (for example, locally) a viral vector encoding a CAR and a cell activation agent, delivered by mesoporous silica rods (MSRs), for transduction of T cells and generation of CART cells in vivo. Without wishing to be bound by theory, brief CD3 and CD28 activation, for example, using anti-CD3/anti-CD28 (for example, a bispecific antibody), promotes efficient transduction of T cells. Without wishing to be bound by theory, in some embodiments, these transduced T cells will return into systemic circulation via the skin lymphatics, lymph nodes and thoracic duct and will further expand in response to tumor antigen.

### Example 1: Generation and Characterization of VEGF-C Protein and Functional Variants

[0758] This Example describes the generation and characterization of various cell recruitment factors, including VEGF-C and functional variants thereof. Cell recruitment factors described in this Example may, for example, be used in cryogels for promoting lymphangiogenesis in a site in a subject prior to administration of a viral vector encoding a CAR.

[0759] As shown in FIG. 19A, VEGF-C can exist in natural and modified forms. Immature VEGF-C(FIG. 19A, #1) is typically found intracellularly with N-terminal and C-terminal propeptide sequences. Once released, VEGF-C protein undergoes proteolytic cleavage and is present in the extracellular space as a major or minor mature form (FIG. 19A, #2 (SEQ ID NO: 731) or #7 (SEQ ID NO: 733), respectively) that is either a dimer or monomer. Stabilized dimers of the major mature (FIG. 19A, #9 (SEQ ID NO: 737)) and minor mature (FIG. 19A, #8 (SEQ ID NO: 735)) form of VEGF-C were engineered by inserting the C137A mutation into the sequences. As compared to the major mature forms of VEGF-C, the minor mature forms comprise an additional, short propeptide sequence (TEETIKFAA (SEQ ID NO: 740)) on the minor mature form N-terminus. Without wishing to be bound by theory, in some embodiments, this additional short propeptide boosts dimer formation as well as protein expression in both HEK293T and CHO MaKo cells.

[0760] HEK Production of VEGF-C Protein and Functional Variants

[0761] DNA was synthesized at GeneArt (Regensburg, Germany) and cloned into a mammalian expression vector using restriction enzyme-ligation based cloning techniques. The resulting plasmid was transfected into HEK293T cells. For transient expression of proteins, vectors for wild-type or engineered variants were transfected into suspension-adapted HEK293T cells using Polyethylenimine (PEI; Cat #24765 Polysciences, Inc.). The recombinant expression vectors were then introduced into the host cells and the construct produced by further culturing of the cells for a period of 7 days to allow for secretion into the culture medium. The produced constructs were then purified from cell-free supernatant, using immobilized metal ion affinity chromatography (IMAC). His-tagged proteins were captured by IMAC. The resin was washed before the protein was eluted. Finally, eluted fractions were polished by using size exclusion chromatography (allowing separation of aggregates, monomers and dimers). Purification analysis was done using SDS-PAGE (FIG. 19B-19C) under reducing and non-reducing conditions and aggregation content was determined using analytical size exclusion chromatography method.

[0762] As shown in FIG. 19B-19C, the immature VEGF-C with the full length propeptide (FIG. 19A, #1 (SEQ ID NO: 727)) was produced as a dimer (wells 2 and 3) and the removal of the propeptide led to the production of two major mature VEGF-C forms (#2 (SEQ ID NO: 731)), one non-covalent dimer form (wells 5, 6) and a monomeric form (wells 8, 9). A short N-terminal propeptide was left attached to the protein to generate a minor mature, wild type VEGF-C form (#7 (SEQ ID NO: 733)) in non-covalent dimer (wells 11,12) or in monomeric form (wells 15,16). Addition of the mutation C137A into the #2 major mature form of VEGF-C to generate the #9 major mature form with mutation of VEGF-C(SEQ ID NO: 737) led to the production of a covalent dimer (well 21, 22) and a monomer form (well 24, 25). Introduction of the C137A mutation to the #7 minor mature VEGF-C form to generate the #8 minor mature with mutation form of VEGF-C(SEQ ID NO: 735) led to the detectable production of a VEGF-C dimer only (wells 18,19). Without wishing to be bound by theory, in some embodiments, this #8 minor mature with mutation form of VEGF-C(SEQ ID NO: 736 or 735) may be suitable for large scale production.

[0763] Overall production yield using HEK cells was calculated and summarized in Table 21.

TABLE 21
Production yield of VEGF-C variants in HEK293T cell line

| | Physical | Final yield after IMAC |
|---|---|---|
| Variant | state | and SEC (ug/L) |
| 1 | Dimer | 117 |
| 2 | Dimer | 405 |
| | Monomer | 714 |
| 7 | Dimer | 1120 |
| | Monomer | 623 |
| 8 | Dimer | 1190 |
| 9 | Dimer | 869 |
| | Monomer | 125 |

[0764] CHO Production of the VEGF-C #8 Minor Mature Variant

[0765] A CHO MaKO manufacturing expression system was then used to produce the VEGF-C variant #8 (minor mature form with mutation, SEQ ID NO: 736 or 735). The gene encoding the target protein was introduced into an expression cassette driven by a CMV promoter in a plasmid expression vector. The vector was transfected in triplicate into CHO MaKO cells. For each transfection, 0.5 μg of plasmid were transfected into viable cells in medium. The transfected cells were seeded into cell culture medium with low concentration of folic acid in shake flasks. Cells were grown in a humidified shaker incubator. On day 3 post transfection, selection for stable transfectants was started. The cells went into a selection crisis and were recovered within 21 days. Then vials of the selected stable pools were frozen.

[0766] For production of the VEGF-C variant #8 (minor mature form with mutation, SEQ ID NO: 736 or 735), a fed-batch approach was used. A vial of the frozen cells was thawed. After recovery from thawing, cells were seeded into production cell culture medium in shake flasks. Cultures were grown in a humidified shaker incubator. Growth temperature was decreased on day 5 after seeding the culture. Feed solutions were added on day 3, 4, 5, 6, 7 and 10 after seeding. The culture was harvested on day 11 after seeding. Cells were separated from the cell culture medium by centrifugation and sterile filtering. The target protein was purified from the clarified cell culture supernatant and characterized as above. The production yield of the VEGF-C variant #8 (minor mature form with mutation, SEQ ID NO: 736 or 735) is summarized in Table 22.

TABLE 22
Production yield of VEGF-C variant 8 in CHO MaKO cell line

| | Physical | Final yield after IMAC |
|---|---|---|
| Variant | state | and SEC (mg/L) |
| 8 | Dimer | 17.5 |

[0767] Investigation of the In Vitro Activity of VEGF-C

[0768] The in vitro biological activity of VEGF-C and the variant forms produced above were investigated. The impact of VEGF-C on human dermal lymphatic endothelial cells (HDLECs), including sprouting and proliferation (FIG. 20A-20C), was measured. The various VEGF-C variants investigated in this example include: the immature VEGF-C with the full length propepitde (#1); the major mature form #2 as a monomer (2M) or a dimer (2D); minor mature form #7 as a monomer (7M) or a dimer (7D); the major mature form with mutation (C137A) #9 as a monomer (9M) or a dimer (9D); and the minor mature form with mutation (C137A) #8 as a monomer (8M) or a dimer (8D).

[0769] An overview of the experimental setup of the in vitro sprouting assay on HDLECs to test the biological activity of VEGF-C variants is shown in FIG. 20A. HDLECs were first seeded (p0) and passaged at 75% confluence until p4 or enough cells were obtained for experiments. About 1 mL of the HDLECs was then aliquoted into Eppendorf tubes, treated with 600 μg of VEGF-C protein, and vortexed. Each treatment was added to warmed media in a 6 well plate and incubated overnight at 37 C (5% CO₂). For imaging analysis, cells were washed and then fixed with 3.7% formalin-0.05% Triton X-100 solution (fixing buffer), then washed and coated with 0.1% Triton X-100 solution (permeabilization buffer). After washing twice with PBS, cells were coated with 0.05% Triton X-100 in 1% BSA solution (blocking buffer). DAPI and phalloidin staining was performed according to known protocols. After phalloidin staining, cells were washed twice with PBS, and imaged for tube formation.

[0770] In order to measure proliferation, a WST-8 assay was performed (FIG. 20B), in which WST-8 media was first prepared by diluting WST-8 solution 1:10 into MV media. Culture media was removed, and cells were incubated in WST-8 media. Following incubation, media was removed in triplicate from each well and added to a 96 well plate. Absorbance of each well at 450 nm was read using a spectrophotometer.

[0771] As shown in FIG. 20B, all VEGF-C mature forms (wild-type or mutant major and minor mature forms) led to similar levels of proliferation of HDLECs, which was improved relative to proliferation of HDLECs incubated with the immature VEGF-C with the full length propeptide (#1). As shown in FIG. 20C, the tube formation images show that the major and minor mature forms that are wild-type (#2 and #7, respectively) or comprise the C137A mutation (#9 and #8, respectively) stimulate better sprouting of HDLECs than the immature form (#1). Further, the dimeric forms (D) of the various VEGF-C forms appeared to demonstrate good in vitro activity (FIG. 20B-20C). Without wishing to be bound by theory, in some embodiments, the dimeric forms of the major and minor mature forms that are wild-type (#2D and #7D, respectively) or comprise the C137A mutation (#9D and #8D, respectively) comprise enhanced sprouting activity as compared to the monomeric forms.

### Example 2: Generation and Characterization of Cryogel containing VEGF-C

[0772] A cryogel containing VEGF-C or functional variants was generated and investigated. Laponite was added to the cryogel formation to result in a slow, more controlled release of VEGF-C.

[0773] To form the cryogel, alginate conjugates were formulated based on a previously described protocol (Koshy et al., Acta Biomater. 2018 January; 65:36-43) and mixed.

[0774] Norbornene ALinate (Alg-Nb)

[0775] One gram of Pronova UP MVG alginate was dissolved in 100 ml of 0.1 M 2-(N-morpholino)ethanesulfonic acid (MES) buffer overnight at room temperature under constant stirring. 280 μl of 5-norbornene-2-methylamine (norbornene) was then added to the alginate solution. 1464 mg of 1-ethyl-3-(3-dimethylaminopropyl)-carbodiimide hydrochloride (EDC) and 1085 mg of N-hydroxysuccinimide (NHS) were separately dissolved in 20 ml of MES buffer and added to the alginate-norbornene solution and allowed to react for 24 hours at room temperature. After 24 hours the solution was dialyzed in sequential 5 L salt baths (7, 6, 5, 4, 3, 2, 1, 0, 0, 0 g/L NaCl) for 3 hours at each concentration. Solution was then filtered twice (0.22m vacuum) and frozen at −80° C. overnight. Frozen solutions were then lyophilized for 5 days and stored at −20 C until use in experiments.

[0776] Tetrazine Alginate (Alg-Tz)

[0777] One gram of Pronova UP MVG alginate was dissolved in 0.1 M 2-(N-morpholino)ethanesulfonic acid (MES) buffer overnight at room temperature under constant stirring. 126 mg of (4-(1,2,4,5-tetrazin-3-yl)phenyl methanamine hydrochloride (tetrazine) was then added to the alginate solution. 1464 mg of 1-ethyl-3-(3-dimethylaminopropyl)-carbodiimide hydrochloride (EDC) and 1085 mg of N-hydroxysuccinimide (NHS) were separately dissolved in 20 ml of MES buffer and added to the alginate-tetrazine solution and allowed to react for 24 hours at room temperature. After 24 hours, solution was quenched with 311 mg of hydroxylamine for 30 min and centrifuged at maximum RPM for 10 minutes. Solution was then filtered (0.22 uM filter) and dialyzed in sequential 5 L salt baths (7, 6, 5, 4, 3, 2, 1, 0, 0, 0 g/L NaCl) for 3 hours at each concentration. Solution was then filtered twice (0.22 uM filter) and frozen at −80° C. overnight. Frozen solutions were then lyophilized for 5 days and stored at −20 C until use in experiments.

[0778] Cryogel Formulation

[0779] The Alg-Tz and Alg-Nb were then dissolved in DIH₂O at 20 mg/ml with a Thermomixer (37 C, 2000 rpm) for 1 hour. Separately, laponite was dissolved for 1 hour at 5 mg/ml concentration in DI-H₂O under constant mixing at room temperature. Solutions were then filtered (0.22 uM filter) under sterile conditions.

[0780] For cryogels not containing laponite, the Alg-Tz solution and Alg-Nb solutions were then added together in a 1:1 ratio along with the desired amount of VEGF-C and diluted to a final concentration of 10 mg/ml (10 μg VEGF-C/gel).

[0781] For cryogel formulations containing laponite, VEGF-C(3 mg/ml stock) and laponite (Laponite XLG) (5 mg/ml stock) solutions were incubated together at room temperature for 1 hour. Alg-Tz solution and Alg-Nb solutions were then added in a 1:1 ratio and diluted to a final concentration of 10 mg/ml (0.25 mg/ml final concentration of laponite, 10 μg VEGF-C/gel). 50p of the cryogel and VEGF-C mixture with or without laponite was immediately pipetted into PEEK molds and frozen at −20° C. overnight. Prior to injection, gels were thawed at room temperature in the molds and then placed into 16 ga syringe needles. Needles with gels were then placed on 1 ml syringes with 100 μl of sterile PBS.

[0782] In vitro VEGF-C release from alginate cryogels The release rate of VEGF-C from alginate cryogel formations comprising laponite was investigated in vitro. As described above, alginate liquid prepolymer is mixed with laponite and VEGF-C, then frozen and thawed again before injection to generate porous matrix (FIG. 21A).

[0783] First, the release of VEGF-C from alginate cryogels with and without laponite was measured. Different types of alginate gels containing VEGF-C(10 μg protein) were formed for use in the VEGF-C release assay: alginate nanoporous (gelification occurs without cryogelation so no macro-scale pores are formed), alginate cryogel (after freeze and cryogelation, porous), and alginate cryogel with 0.25% laponite. To perform the release assay, VEGF-C cryogels (10 μg protein+0.25 mg/ml laponite) were incubated at 37° C. in 1 ml of release buffer (1% BSA solution in PBS). Release buffer was completely removed and replaced at various timepoints throughout the experiment, ranging from 0 to more than 500 hours following the addition of the release buffer. Samples of release buffer that were collected were stored at −80° C. until thawed for use in a VEGF-C ELISA. As shown in FIG. 21B, the alginate cryogel with 0.25% laponite showed the most controlled and longest-lasting release of VEGF-C in vitro.

[0784] Next, the modulation of VEGF-C release in vitro from a 0.25% laponite alginate cryogel loaded with 10 μg or 50 μg VEGF-C, or a 0.5% laponite alginate cryogel loaded with 50 μg VEGF-C were measured. As demonstrated in FIG. 21C, about 30% of the total VEGF-C was released from the gels and the 0.25% laponite alginate cryogel showed the most controlled release profile.

[0785] A cryogel was injected subcutaneously in mice using a 16G needle. FIG. 21D demonstrates successful implantation of the cryogel in the skin of a mouse.

[0786] Investigation of VEGF-C Cryogels In Vivo

[0787] The ability of VEGF-C delivered via cryogel (0.25 mg/ml laponite) to implant and induce lymphangiogenesis and recruit T cells in vivo was investigated in mice. These series of experiments investigate the ability of different VEGF-C variants including those comprising a C137A mutation and VEGF-C variants produced by different methods to induce lymphangiogenesis. The ability of varying amounts of VEGF-C cryogel to induce lymphangiogenesis and recruit T cells in wild type mice and immunocompromised NSG mice injected with human peripheral blood mononuclear cells (PBMCs) was also investigated.

[0788] First, cryogels (0.25 mg/ml laponite) containing 10 μg of different VEGF-C forms, including the dimeric forms of the major and minor mature forms that are wild-type (#2 and #7, respectively) and the major and minor mature forms that comprise the C137A mutation (#9 and #8, respectively), were injected superficially into the dermis of mice (N=5/group) at day 0. At day 14 mice were euthanized and the skin/cryogel (combined) were dissected for digestion and FACS analysis (FIG. 22A). Specifically, tissues were harvested from mice, weighted, and cut into very fine pieces with scissors. Samples were then enzymatically digested under constant stirring of digestion media containing collagenase 4 and DNAse 1. Samples were then pipetted up and down. Following pipetting, digestion media containing collagenase D and DNAse 1 was added to the samples. Samples were pipetted up and down for 3 cycles. EDTA was added (5 mM) and cells were filtered through 70 μm filters and 40 μM mesh and resuspended in Fc blocking buffer. Cells were washed and stained for FACS analysis.

[0789] Representative FACS plots of lymphatic endothelial cells (LECs) (CD31*, PDPN+) isolated on day 14 post-injection of the cryogel were pre-gated on FSC-A/SSC-A, and CD45-(FIG. 22B) and show that in vivo lymphangiogenesis was induced. The amount of lymphangiogenesis in mouse skin was quantified as LEC counts per mg of tissue, as shown in FIG. 22C. The covalent dimers of the major and minor mature forms that comprise the C137A mutation (#9 and #8, respectively) resulted in higher amounts of LECs compared to the dimers of the major and minor mature forms that are wild-type (#2 and #7, respectively), and thus led to higher levels of in vivo lymphangiogenesis following cryogel implantation (FIG. 22C).

[0790] In addition, the functionality of the VEGF-C variant #8 (minor mature form with C137A mutation) produced in CHO MaKo cells as described above was investigated in vivo and compared to the same mutant form produced in HEK cells. Both #8 variants showed comparable activity in an in vitro HDLECs sprouting assay despite being produced in different cell types.

[0791] The VEGF-C variant #8 produced in CHO MaKo cells was able to induce lymphangiogenesis in vivo as shown in FIG. 24B, as compared to a blank cryogel control which does not comprise VEGF-C. Comparable bioactivity of the two #8 variants produced by the different cell types was then also confirmed in vivo by staining LECs after skin digestion 14 days after cryogel delivery (FIG. 24C). Lymphangiogenesis was quantified as total LECs counts/mg tissue in mice injected with a blank cryogel (no VEGF-C) or cryogel loaded with the #8 VEGF-C variant produced in HEK cells (#8HEK) or the #8 VEGF-C variant produced in MaKo cells (#8CHO). Blood vascular endothelial cells (BECs) (CD45−CD31+PDPN−) were not affected by the #8 variant VEGF-C delivery regardless of which cell type it was produced in. It was also observed that peak lymphangiogenesis corresponded to elevated LEC levels and peak immune infiltration of CD4 and CD8 T cells (CD45+) in the skin on top of the cryogels on day 14 after cryogel delivery with the #8 variant VEGF-C delivery regardless of which cell type it was produced in.

[0792] In addition, the response of skin lymphatics to 10 g VEGF-C delivered by alginate cryogels was measured. Mice were injected with VEGF-C alginate cryogels (N=12) or blank cryogels (does not comprise VEGF-C) (N=10) synthesized as previously mentioned. Skin/gels from mice were harvested as described above, at timepoints day 7, 14, and 21, digested, and stained for FACS. LECs were gated on CD45⁻ CD31⁺ PDPN⁺. BECs were gated on CD45⁻ CD31⁺ PDPN⁻. CD4 and CD8 T Cells were gated on CD45⁺ CD11b⁻ CD11c⁻ Thy1⁺. The number of cells per mg of tissue were also quantified.

[0793] FIG. 23A depicts the in vivo dose response of VEGF-C loaded into alginate cryogels (1, 10, 20, 50 μg) and lymphangiogenesis induction (represented as total lymphatic endothelial cells (LECs) counts/mg tissue, upper graph) and time course of lymphangiogenesis after delivery of 10 μg VEGF-C(lower graph). These results indicated that 10 μg of VEGF-C induced high in vivo lymphangiogenesis and that peak lymphangiogenesis was observed 14 days after subcutaneous cryogel delivery. Representative plots of LECs (CD45−CD31+PDPN+) and blood endothelial cells (BECs, CD45−CD31+PDPN−) staining isolated after skin digestion of C57/BL6 mice 14 days after gel implant (FIG. 23B) as well as quantification of endothelial cells as total cell counts/mg tissue (FIG. 23C) also indicated that 10 μg of VEGF-C induced high in vivo lymphangiogenesis compared to blank gel controls that did not comprise VEGF-C. Further, quantification represented as total cell counts/mg tissue of CD4+ T cells and CD8+ T cells demonstrated that T cell infiltration was also increased following 10 μg of VEGF-C alginate cryogel delivery, and LECs counts correlated with T cells infiltrates especially those of a naïve phenotype (CD62L+, CD44−). As shown in FIG. 23E, peak lymphangiogenesis was observed 14 days after subcutaneous VEGF-C alginate cryogel delivery, and peak T cell infiltrates were also observed on day 14.

[0794] The ability of VEGF-C to induce lymphangiogenesis in immunocompromised NSG mice and the ability of mouse LECs to efficiently recruit human peripheral blood mononuclear cells (PBMCs) was investigated. In FIG. 25A, C57B6 mice were injected with either VEGF-C cryogels/0.25% laponite (N=5) or blank cryogels (N=5) and evaluated for lymphangiogenesis at day 14. Additionally, NSG mice were injected with VEGF-C cryogels (N=5) to compare LEC proliferation between immunocompetent mice (C57B16) and immune-compromised mice (NSG). Representative flow cytometry plots of skin LECs and BECs staining in NSG, C57/BL6 mice 14 days after VEGF-C or blank cryogel delivery demonstrated increased LECs and thus higher in vivo lymphangiogenesis following delivery of VEGF-C cryogels in NSG and C57B6 mice (FIG. 25A). In FIG. 25B, NSG mice were injected on day 0 with either VEGF-C cryogels (N=5) or blank cryogels (N=5). On day 10, all mice were injected with PBMCs via their lateral tail vein. Seven days after PBMC injection, skin/gel tissue was collected for digestion and FACS analysis. LECs were gated on human CD45⁻ mouse CD11b⁻ mouse CD31⁺ mouse PDPN⁺. CD4 and CD8 T cells were gated on human CD45⁺ mouse CD11b⁻ human CD3⁺. B Cells were gated on human CD45⁺ mouse CD11b⁻human CD3⁻ human CD19⁺. These data demonstrate that CD3+ T cells, CD4+ T cells, CD8+ T cells, and B cells were all increased in the skin of the NSG mice administered the VEGF-C cryogels compared to the blank cryogel controls (no VEGF-C), and that T cells were the main cell type of PBMCs recruited in NSG mice.

[0795] Taken together, these data indicate that alginate cryogels comprising VEGF-C with or without laponite were capable of locally inducing lymphangiogenesis and T cell recruitment to the site of cryogel administration in vivo.

### Example 3: MSR Synthesis for Transduction of T Cells to Generate CART Cells

[0796] This Example describes the synthesis of mesoporous silica rods (MSRs). Mesoporous silica particles (MSPs) such as MSRs may be used, e.g., to assist with delivery of a viral vector encoding a CAR to a site in a patient that has undergone lymphangiogenesis due to administration of a VEGF-C cryogel described above.

[0797] MSR synthesis was performed by first dissolving poly(ethylene glycol)-block-poly(propylene glycol)-block-poly(ethylene glycol) avg Mn ˜5,800 (Pluronic P-123, 80.0 g, 487 mmol; Sigma) surfactant in 3 L of 1.6M HCl at room temperature, which was then heated to 40 C in a 5 L jacketed flask, and mechanically stirred via and overhead stirrer at a rate of 0-600 rpm. Tetraethyl orthosilicate (TEOS, 184 mL, 826 mmol; Sigma) was added in one portion over <5 min and was heated at 40 C with maintained stirring for at least 2 hours but most commonly 20 hours. The resulting slurry was heated to 80-130 C for 6-72 hours for hydrothermal treatment before being cooled to room temperature. The slurry was filtered in a Buchner funnel and was washed with deionized water followed by ethanol and air dried at room temperature. The resulting silica material was calcined in a furnace with a slow ramp temperature from room temperature to 550 C over 8 hours and then maintaining at 550 C for another 8 hours before cooling to room temperature to afford 47 g of mesoporous silica particles.

[0798] Changes in the stir rate may have changes in the microparticle aspect ratio. Varying the conditions of the hydrothermal temperature and duration are common pore size controllers for mesoporous materials.

[0799] Final mesoporous materials were characterized by light microscopy, Malvern Morphologi G3, scanning electron microscopy (SEM), thermal gravimetric analysis (TGA).

[0800] N,N,N-trimethylpropan-1-ammonium Functionalized Microparticles

[0801] Trimethoxysilylpropyltrimethylammonium chloride (3.61 mL, 6.51 mmol; 50% solution in methanol) was added to a slurry of 1.0 g mesoporous silica microparticles in 150 mL reagent ethanol and was heated to 75 degrees Celsius for 7 hours. After cooling to room temperature and the slurry was filtered and the particles were washed with deionized water followed by ethanol and then dried in an oven at 100 degrees Celsius for 20 hours to afford N,N,N-trimethylpropan-1-ammonium functionalized microparticles, referred to herein as “trimethylammonium MSRs”.

[0802] MSR Size Reduction

[0803] Stock MSR variants were roughly 100-200 μm in length after synthesis. MSRs were homogenized to reduce their size and improve injectability. In particular, to improve injectability through a 28.5 ga insulin syringe, dry MSRs were homogenized in a MP FastPrep-24 5G bead beating grinder and lysis system for 80 seconds (FIG. 30A). In FIG. 30A, size reduction was observed in terms of MSR length, which allows for injection through a smaller diameter needle into the intradermal space. MSRs were then autoclaved and stored at room temperature until use.

[0804] Loading of Lentivirus onto MSRs and Characterization of the MSR+Viral Vector

[0805] Homogenized MSR batches were resuspended at 10 mg/ml in ice-cold Tris-NaCl-EDTA buffer pH 7.5 (NTE buffer). The desired lentivirus stock (described below) was diluted in ice-cold NTE buffer to the desired total amount of transducing units (TU) for loading. The MSR suspension and the diluted virus were combined at ratios of 1:1 vol/vol and incubated on ice for 30 minutes. At least two wash steps in excess DPBS were performed to remove excess virus prior to functional in vitro tests, or in vivo use. For loading and retention studies (FIGS. 27-28), a 2.5 mg/ml MSR suspension was mixed 1:1 with a solution containing the indicated amount of virus in the figures and incubated for 30 minutes on ice. Virus amounts in loading solutions, bound to the MSRs, and released from the MSRs was quantified using a commercially available kit, e.g., a qRTPCR based kit, e.g., Lenti-X qRT-PCR Titration Kit. For release studies, the MSR-lentivirus complex was incubated in the media at 37° C., and the supernatant was collected at the indicated timepoints for qPCR analysis.

[0806] First, the loading capacity of MSRs with a GFP-encoding lentivirus was measured. Trimethylammonium MSRs were co-incubated with a GFP-expressing lentivirus at various amounts according to functional titers as determined by cell-based transduction assays. The amount of virus in three fractions was characterized, which include the viral loading solution (initial input added to the MSRs), MSR-bound virus (amount remaining bound to the MSRs after incubation and washing), and unbound virus (the amount in the solution remaining after co-incubation of MSRs and virus). MSR and virus were co-incubated for 30 minutes on ice, the supernatant was removed (Unbound Virus) and the MSRs were washed twice prior to assessing MSR-bound virus. The untouched viral loading solutions from each condition were also analyzed. As shown in FIG. 27A, the majority of the virus in the input viral loading solution was retained in the MSR-bound virus fraction after adsorption and washing as compared to the unbound virus. The amount of virus adsorbed to the MSRs also increased with the amount of virus in the viral loading solution. As depicted in FIG. 27B which graphs the percentage of viral loading solution versus the functional titer of virus, the calculated fraction of MSR-bound virus relative to the viral loading solution had a strong efficiency of loading and retention on the MSRs following adsorption and washing.

[0807] Next, retention of virus on MSRs was characterized. Specifically, lentivirus and MSRs were co-incubated for 30 minutes on ice, and the MSRs were washed twice. MSRs were then cultured in R10 medium containing 10% FCS or OpTmizer serum-free medium, and the input virus stock was incubated in media as well. The supernatant was removed at the indicated times after the start of incubation and analyzed for total virus content. As demonstrated in FIG. 28, the results indicated that the MSRs release only a fraction of the input virus over the first 18 hours (MSR-Virus in R10 media and MSR-Virus in OpTmizer media), compared to unbound virus controls (virus in R10 media and virus in OpTmizer media).

### Example 4: Transduction of T Cells with MSR and Viral Vector, and Optionally STARTERS, and Functional Testing

[0808] This Example describes the transduction of T cells in vitro using a viral vector encoding a CAR. Without wishing to be bound by theory, the viral vector was administered together with MSR (to promote controlled release of the vector), and optionally also STARTERS (to promote activation of the T cells).

[0809] In Vitro T Cell Transduction with MSR+Viral Vector+Optionally STARTERS

[0810] Human T cells were isolated from leukopaks using the Miltenyi Human Pan T cell isolation kit and frozen prior to use. Cells were thawed and plated in complete OpTmizer medium in the presence of STARTERS Construct 4 (Table 20, FIG. 48A). CD19 CAR encoding (also referred to as CAR19) virus, either as free virus or MSR-virus complexes were added into the culture, followed by one day of incubation. Cells were washed and plated for three additional days prior to use in characterization and functional tests.

[0811] CAR T Cell Characterization and Functional Testing

[0812] CAR T cells were analyzed for expression of the CAR receptor by staining with a CD19 CAR anti-idiotype antibody conjugated to PE and analysis by flow cytometry.

[0813] To measure CD19 CAR expression, the percentage of CAR+ cells was quantified at day 4 after transduction (FIG. 29A). Transduction efficiency of T cells in vitro was comparable for those T cells transduced with CAR-MSR or CAR-free (unbound virus) (FIG. 29A).

[0814] To measure function of CD19 CAR T cells transduced with MSR-bound virus or unbound virus, a Nalm6-Luc cell specific killing assay and an interferon-T (IFN-γ) release assay were used. Nalm6 (RRID: CVCL_0092) is a human acute lymphoblastic leukemia (ALL) cell line. Cells were grown in RPMI medium containing 10% fetal bovine serum and were grown in suspension. Cells were modified to express luciferase (Nalm6-Luc), so that their presence in co-cultures could be assessed by luciferase signal. Nalm6-Luc cells were co-cultured at various cellular ratios (Effector to Target rations (E:T Ratio)) with CD19-CARTs produced using free virus or MSR-virus complexes (FIG. 29B-29C). The luciferase signal at the end of a 1-day co-culture was used to calculate the percentage of input Nalm6 that had been killed by the CARTs. IFN-γ levels in the supernatant at the end of the co-culture were quantified using a commercially available kit.

[0815] Results from these assays indicate that specific killing activity (FIG. 29B) and IFN-γ release (FIG. 29C) during the co-incubation for 24 hours were comparable between CART cells transduced with the MSR-bound virus (CAR-MSR) and CART cells transduced with the free virus (CAR-free), showing that transduction by formulation with MSRs produced equivalently functional CARTs in vitro compared to conventional free virus transduction.

[0816] Next, the transduction efficiency of MSRs following homogenization was assessed. MSRs were homogenized as described above to allow for injection through a smaller diameter needle (FIG. 30A). As shown in FIG. 30B, standard trimethylammonium MSRs or homogenized MSRs were adsorbed with lentivirus and a dilution series of this complex was created and used to transduce T cells with a GFP-encoding lentivirus. Homogenization of MSRs did not substantially alter transduction performance in vitro.

[0817] Administration of Cryogel/Laponite Followed by MSR+ Viral Vector In Vivo

[0818] An experiment was designed to investigate localization and distribution of a cryogel injected into mice followed by injection of MSR-virus complexes. Blank alginate cryogels were injected subcutaneously and 7 days later viral particles (4e6 TU) free or bound to MSRs were injected in the intradermal space on top of the gel with insulin syringe (for MSR-virus group) or Hamilton syringe (for free virus). 72h after viral delivery, mice were euthanized, and tissues (skin and draining lymph node) were harvested for immunohistochemistry analysis. Skin/cryogel tissues, adjacent skin and draining lymph node were collected at necropsy, submersion fixed in 10% neutral buffered formalin and processed to paraffin. Sections were stained with hematoxylin and eosin (H&E) for histological evaluation. Slides were digitalized using a slide scanner and representative images captured. FIG. 31A-31B depict the hematoxylin and eosin (H&E) stained section of skin containing adjacent cryogel and MSRs.

[0819] In FIG. 31A, H&E stained sections demonstrated the location of the subcutaneous cryogel superficial to the panniculus muscle in the hypodermis. The MSRs appeared as lightly eosinophilic granular material admixed with mononuclear cells positioned at the dermal-hypodermal junction adjacent to the implanted cryogel (FIG. 31B for close up image).

[0820] FIGS. 32A-32B show in situ hybridization for CAR mRNA on sections of isolated mouse skin. In situ hybridization to detect CAR transcript as well as Hs-PPIB (positive control and tissue quality control) and DAPB (negative control) genes was performed on formalin fixed paraffin embedded tissue sections. Positive PPIB and negative DAPB control probe sets were included to optimize preconditioning and ensure mRNA quality and specificity, respectively. The hybridization method followed known protocols using a 3,3′-Diaminobenzidine (DAB) chromogen. Briefly, 5 μm thick tissue sections were placed on glass slides, baked for 60 minutes and used for hybridization. The deparaffinization and rehydration protocol was performed using a stainer. Off-line manual pretreatment in 1×retrieval buffer was conducted. Optimization was performed by first evaluating PPIB and DAPB hybridization signal and subsequently using the same conditions for all slides. Following pre-treatment, the slides were transferred to an autostainer to complete the hybridization procedure including protease pretreatment; hybridization followed by amplification; and detection with HRP and hematoxylin counter stain. Slides were digitalized using a slide scanner and representative images captured.

[0821] As shown in FIG. 32A, in situ hybridization to detect CAR mRNA transcript demonstrated robust signal within regions corresponding to the injected MSR in mice injected with MSR-bound virus. As depicted in FIG. 32B, in situ hybridization detected diffuse signal in cells infiltrating the cyrogel, as well as cells adjacent to it in the free virus condition. These data appear to support the notion that MSRs may maintain the virus localized in the dermis where the T cells are infiltrating the skin.

[0822] FIGS. 33A-33B show a mouse injected with MSR-virus had less CAR mRNA transcript positive cells in draining lymph node compared to the free virus group. In situ hybridization for CAR mRNA was performed as described above on sections of draining lymph node (dLN). This in situ hybridization detected only one CAR mRNA transcript positive cell within the dLN of mice injected with MSR-bound virus (FIG. 33A), while mice injected with free-virus showed a few CAR mRNA transcript positive cells in the subcapsular sinus consistent with local drainage of the virus or the cells from the site of cryogel implantation (FIG. 35B). This study demonstrated that MSP-virus formulations limited virus drainage to the draining lymph node, thereby decreasing potential off-site transduction and improving safety.

[0823] MSR Loading with Virus and STARTERS for In Vivo Use

[0824] STARTERS (specifically, STARTERS Construct 2, shown in Table 20, FIG. 37A) and trimethylammonium MSRs were co-incubated to allow adsorption of the cell activation agent onto the MSR surface. STARTERS Construct 2 protein was added to an 8 mg/ml trimethylammonium MSR suspension and incubated for 1 hour at 4° C. Loaded MSRs were washed three times and resuspended in DPBS to a final concentration of 15 mg/ml MSRs. NTE buffer solution containing CD19 CAR encoding lentivirus was mixed with a 10 mg/ml trimethylammonium MSR suspension and incubated for 30 minutes at 4° C. MSRs were washed twice and resuspended in DPBS to a final concentration of 15 mg/ml MSRs. Finally, MSRs were vigorously pipetted up and down, back loaded into insulin syringes, and immediately injected intradermally into mice.

[0825] Taken together, these data indicate that MSR-bound virus, together with a STARTERS construct, was capable of efficiently transducing T cells to produce functional CART cells. Accordingly, contemplated herein is VEGF-C delivery in mouse skin generating a secondary priming site for T cells to be educated and transduced after injection of viral particles bound to mesoporous silica rods (MSRs) in combination with MSR-bound STARTERS (FIG. 26A), or free virus in combination with MSR-bound STARTERS (FIG. 26B).

### Example 5: In Vivo CART Manufacturing

[0826] A study was performed to demonstrate viral transduction of human T cells with a CD19 CAR encoding lentivirus in an in vivo mouse model. Specifically, a VEGF-C cryogel (0.25 mg/ml laponite) was administered to mice to promote lymphangiogenesis and recruitment of T cells. Next, a combination of a viral vector encoding CD19 CAR, MSR, and STARTERS was administered to activate and transduce the T cells in the area that underwent lymphangiogenesis.

### Methods

### Mouse Study and Flow Cytometry Analysis

[0827] NSG mice (N=45) were injected with VEGF-C cryogels at day 0 and PBMCs at day 10 via tail vein injection. Seven days later at day 17, mice were intradermally injected with either: 1) PBS (N=15 total/5 for endpoint FACS analysis), 2) MSR with STARTERS Construct 2 (10p injection of 15 mg/ml MSR equivalent, produced as described above) followed by free CD19 CAR encoding lentivirus (10 μl injection containing 4.26e6 TU of virus at 1 hour post STARTERS injection) (N=15 total/6 for endpoint FACS analysis) or 3) MSR bound CD19 CAR encoding lentivirus mixed 1:1 with MSR with STARTERS Construct 2 (20 μl single injection of 15 mg/ml MSRs) (N=15 total/5 for endpoint FACS analysis) (FIG. 34A). MSR-STARTERS was used for promoting T cell activation and T cell transduction. On day 14, 3 or 4 mice per group were euthanized and analyzed for lymphangiogenesis in the skin/cryogel injection area. On day 35, mice were euthanized and the spleen and blood were collected to determine if in vivo CD19 CAR encoding viral delivery elicited transduction of those T cells recruited by VEGF-C induced lymphangiogenesis and to look for local and systemic transduced cells (N=3/group/timepoint). Mice were periodically bled for FACS analysis of circulating CD19 CAR+ cells on days 25, 30, 35. Finally, mice were euthanized for FACS analysis of skin/cryogel and spleen on day 35 to look for CART expansion and B cell depletion. B cells depletion and CAR-T cells were also quantified in the spleen of the mice in all groups.

### ISH Staining of CAR

[0828] In situ hybridization using RNAscope 2.5 VS probe CAR 3UTR (catalog #438289) to detect CAR mRNA transcripts as well as 2.5 VS probe Hs-PPIB (positive control and tissue quality control (catalog #313909)) and 2.5 VS probe DAPB (negative control (catalog #3120390) was performed on blocks using reagents and equipment supplied by Advanced Cell Diagnostics (ACDBio) (Hayward, CA) and Ventana Medical Systems (Roche, Tucson AZ). Positive PPIB and negative DAPB control probe sets were included to ensure mRNA quality and specificity, respectively. The hybridization method followed protocols established by ACDBio and Ventana systems using a 3,3′-Diaminobenzidine (DAB) chromogen and optimized for study tissues. Briefly, 5 μm sections were baked at 60 degrees for 60 minutes and used for hybridization. The deparaffinization and rehydration protocol was performed using a Sakura Tissue-Tek DR5 stainer with the following steps: 3 times xylene for 3 minutes each; 2 times 100% alcohol for 3 minutes; air dried for 5 minutes. Off-line manual pretreatment in 1× retrieval buffer at 98 to 104 degrees C. was conducted for 15 minutes. Optimization was performed by first evaluating PPIB and DAPB hybridization signal and subsequently using the same conditions for all slides. Following pretreatment the slides were transferred to a Ventana Ultra autostainer to complete the ISH procedure including protease pretreatment; hybridization at 43 degrees C. for 2 hours followed by amplification; and detection with HRP and hematoxylin counter stain.

### IHC Staining for T Cells

[0829] Immunohistochemistry staining for CD3 including the deparaffinization and antigen retrieval steps were performed on a Ventana Discovery XT autostainer using standard Ventana Discovery XT reagents (Ventana, Indianapolis, IN) using a rabbit monoclonal antibody clone 2GV6 (Ventana catalog #790-431). Slides were deparaffinized then submitted to heat-induced antigen retrieval by covering them with Cell Conditioning 1 (CC1/pH8) solution according to the standard Ventana retrieval protocol. Slides were incubated with the primary antibody or a non-immune isotype-matched negative control. Visualization was obtained by incubation with Ventana Discovery OmniMap HRP reagent followed by Ventana Discovery ChromoMap 3,3′-Diaminobenzidine (DAB). Counterstaining was performed using Ventana Hematoxylin and Ventana Bluing reagent for 4 minutes each. Slides were dehydrated, cleared and coverslipped with a synthetic mounting medium.

### IF Staining Protocol Mouse Tissue for In Vivo CART- Multiplexing

[0830] On day 1, slides were washed and then blocked overnight at 4° C. On day 2, slides were incubated with AffiniPure Fab fragment goat anti-mouse IgG (H+L) and then with Alexa Fluor® 647-labeled anti-CD19 antibody overnight at 4° C. On day 3, slides were washed and then incubated with Alexa Fluor® 488-labeled anti-CD3 zeta antibody overnight at 4° C. On day 4, the slides were washed, counterstained with DAPI, and then washed again. Slides were mounted with cover glass, placed in the fridge for at least 24 hours before imaging.

### Results

[0831] As demonstrated in FIG. 38, T cells were recruited efficiently around the implant site in the mouse skin and surrounding the gel. Results from the CAR ISH study showed that some mononuclear cells (from the phenotype likely T cells) in the area were transduced with the lentiviral vector that encodes CAR (FIG. 39). The expression of CAR RNA was also observed in some endothelial cells (likely lymphatics) (FIG. 39). However, CD19 CAR protein expression on the cell surface, analyzed by flow cytometry, was confirmed to be almost exclusively on T cells, with the exception of few human monocytic cells, indicating that there was minimal transduction of non-T cells by the free virus and MSR-virus (FIG. 35).

[0832] The locally generated CAR-T cells migrated to the spleen (FIG. 40). As shown in FIG. 34B, CAR-T cells as well as significant reduction of B cells were detected in those mice that received (a) free virus and MSR bound with STARTERS Construct 2 or (b) MSR bound CD19 CAR encoding lentivirus mixed 1:1 with MSR with STARTERS Construct 2. The number of B cells in the spleen inversely correlated with the number of CAR-T cells (which were mainly CD8+) in the spleen (FIGS. 34C and 36A) as well as in the blood (FIG. 36B), supporting that B cell depletion was caused by CD19-specific CAR-T cells generated in vivo. As shown in FIGS. 41A-41B, B cells in close proximity with T cells had a shrunken and unhealthy shape indicating cell death, while B cells that did not enter yet in contact with CD19 specific T cells showed a healthy phenotype (round and bigger cells with CD19 staining only at the cell surface). T cells stained with CD3 antibody (dotted staining) were likely CART cells, even though co-stain with CAR probe was not performed.

[0833] This study demonstrates that functional CART cells can be generated in vivo, following local administration of cryogel containing a growth/cell recruitment factor, e.g., VEGF-C, for induction of lymphangiogenesis and recruitment of T cells, which are then subsequently transduced by MSR-bound virus or free virus and MSR-bound STARTERS.

### Example 6: Additional Study Testing In Vivo CART Manufacturing

[0834] In this example, an additional study as laid out in FIG. 42A was conducted to test in vivo CART manufacturing. The methods are similar to the ones described in Example 5. Briefly, NSG mice were subcutaneously injected with VEGF-C cryogel (0.25 mg/ml laponite) at Day −24 and human PBMCs at Day −14. At Day 0, mice were intradermally injected with: 1) free virus and MSP with STARTERS Construct 2 (referred to as the free virus group), 2) MSP with virus and MSP with STARTERS Construct 2 (referred to as the MSP-virus group), or 3) PBS and MSP with STARTERS Construct 2 (referred to as the PBS group). A fourth group of mice received blank cryogel at Day −24 and free virus as well as blank MSPs at Day 0 (referred to as the free virus control group). The first two groups (the free virus group and the MSP-virus group) are referred to as full combination groups or groups receiving full combination treatments. The viral dose was increased from 4e6 TU (Example 5, FIG. 34A) to 1.1e7 TU (Example 6, FIG. 42A).

[0835] As shown in FIG. 42B, human CD45 circulating cells increased in number over time. Full combination treatments (solid line box, white and black circles) further boosted T cell expansion, particularly CD8+ T cells, compared to control mice (dotted line box, grey triangles, white rhombus). Different from the study described in Example 5 (virus injection 17 days after VEGF-C injection and 7 days after PBMC injection), in this new study, virus injection was postponed to 24 days after VEGF-C injection and 14 days after PBMC injection. This modification led to a higher consistency of CART cell generation, likely due to the higher density of T cells around the VEGF-C cryogel implant at this later time point (day 24). As shown in FIG. 43A, in vivo generated human CD3+ CAR+ T cells increased in number over time in mice treated with the full combination treatments (solid line box, white and black circles), particularly CAR-T cells of the CD8 phenotype, compared to control mice (dotted line box, grey triangles, white rhombus). Corresponding to an increase in CAR-T cell number, a decrease of B cells in the circulation was observed over time compared to PBS control (FIG. 43B, upper panel). The MSP-virus and free-virus groups performed similarly, while the free virus control group (FIG. 43B, lower panel) also showed partial B cells depletion, although not to the same extent as the full combination groups. Indeed, the number of circulating CAR-T cells in the mice from the free virus control group was not as high as the number in the full combination groups.

[0836] Consistent with results described in Example 5, this new study also showed a strong correlation between CAR-T cell expansion and B cell depletion in the blood (FIG. 44A) and in the spleen (FIG. 44B). While the free virus control group showed an intermediate level of B cell depletion in the circulation (FIG. 44A), this control treatment did not lead to effective B cell depletion in the spleen (FIG. 44B). The presence of CAR-T cells, especially from the CD8 phenotype, corresponded to B cells depletion in the spleen (FIGS. 45A-45B) and in the skin (FIGS. 46A-46C) of the treated mice. In the skin, CART cell expansion also correlated with lymphangiogenesis as measured by the number of lymphatic endothelial cells (LECs) (FIG. 46D).

[0837] In summary, this study demonstrates that the in vivo CART manufacturing methods described herein can be used to generate functional CARTs, the expansion of which correlates with B cell depletion.

### Example 7: Co-Delivery of Virus and STARTERS Using MSP

[0838] This example examines co-delivery of virus and STARTERS using the same MSP. Briefly, MSPs were simultaneously co-incubated with a lentiviral vector that encodes GFP and STARTERS Construct 1 (Table 20, FIG. 48A). After co-incubation and washing, the virus and STARTERS-loaded MSPs were serially diluted prior to incubation with T cells in a 96 well flat-bottom plate. As shown in FIG. 47, co-delivery of virus and STARTERS using MSP led to successful transgene expression in primary pan T cells.

### Example 8: Generation of STARTERS Molecules

[0839] This example describes the generation of multispecific molecules that comprise an anti-CD3 binding domain and a costimulatory molecule binding domain. In some embodiments, the costimulatory molecule binding domain binds to CD28, CD2, CD25, CD27, IL6Ra, IL6Rb, ICOS, or 41BB. Such molecules are referred to as STARTERS molecules.

[0840] A variety of configurations of anti-CD3× anti-CD28 or anti-CD3× anti-CD2 bispecific antibodies and multimer conjugates thereof were generated. Schema for these molecules are provided in FIGS. 48A-48B (Constructs 1-17, also referred to as F1 to F17; first generation STARTERS molecules). The sequences of Constructs 1-17 and their binding domains are disclosed in Table 19 and Table 20.

[0841] In addition, second generation STARTERS molecules were generated to test binders targeting different co-stimulatory molecules (e.g., CD25, IL6Rb, CD27, 41BB, ICOS, or CD2). Different anti-CD3 binders (binders based on ANTI-CD3 (1) or ANTI-CD3 (2)) were also compared. All the second generation STARTERS molecules (FIG. 49A) have the configuration shown in FIG. 49B. The sequences of the different binders of second generation STARTERS molecules can be found in Table 19.

[0842] Without wishing to be bound by theory, reducing the binding of STARTERS molecules to FcR may decrease or prevent unwanted killing of FcR-expressing cells by T cells. Third generation STARTERS molecules were generated by introducing D265A/N297A/P329A substitutions (EU numbering according to Kabat) (“DANAPA”) in the IgG1 Fc region. In addition, different anti-CD3 binders (binders based on ANTI-CD3 (1), ANTI-CD3 (2), or ANTI-CD3 (3)) and different anti-CD28 binders (binders based on ANTI-CD28 (1) or ANTI-CD28 (2)) were also compared (FIG. 50A). All the third generation STARTERS molecules have the configuration shown in FIG. 50B. The sequences of third generation STARTERS molecules and their binding domains can be found in Table 19 and Table 20.

[0843] The STARTERS molecules were shown to mediate transduction of T cells with a lentiviral vector that encodes a CAR.

[0844] Exemplary methods for assaying STARTERS activity are disclosed, e.g., in Examples 16-19 and 22-23 of PCT/US2021/019889, incorporated by reference herein in its entirety.

### Example J: Use of a STARTERS Molecule in In Vivo CART Manufacturing

[0845] This example describes the characterization of a STARTERS molecule for use in in vivo CART manufacturing. This STARTERS molecule is an anti-CD3/anti-CD28 bispecific molecule comprising an anti-CD28 antibody fused to an anti-CD3 scFv (FIG. 51A). This STARTERS molecule comprises a heavy chain comprising the amino acid sequence of SEQ ID NO: 726 and a light chain comprising the amino acid sequence of SEQ ID NO: 728. The Fc region of this STARTERS molecule comprises L234A/L235A/S267K/P329A mutations, numbered according to the Eu numbering system.

[0846] In a first in vitro study, the STARTERS molecule was tested for its ability to mediate T cell activation and transduction, when delivered via MSPs. Briefly, isolated T cells were thawed and resuspended at 1e6 cells/mL in serum-free T cell media with 100 units/mL of IL2 before being added to a 96-well plate. 20 mg of each MSP batch was resuspended at 30 mg/mL in Dulbecco's PBS (Thermo: #14190144) and 1.5 mg of MSP (or equal volume of DPBS) was added to Eppendorf tubes. To the same Eppendorf tubes, 2.1 μg of STARTERS was added. Lentivirus was thawed on ice and diluted to 1.4e8 TU/mL with DPBS before 7e7 TU of virus was added to each of the aforementioned tubes. After the mixtures were incubated at 4° C. for one hour, they were serially diluted with T cell media before being administered to plated T cells. Components were co-cultured with T cells for three days before T cell activation and transduction were evaluated using flow cytometry.

[0847] Two independently produced batches of MSPs were loaded with lentivirus and the STARTERS molecule prior to co-culturing with T cells in vitro. Delivering the STARTERS molecule bound to MSPs enhanced activation and transduction as compared to soluble delivery of the molecule, particularly in more dilute conditions (FIGS. 51B and 51C). The MSP-virus-STARTERS complexes were co-cultured with T cells for three days before a flow cytometry analysis was performed to examine CD25 expression as an activation readout (FIG. 51B) and GFP expression to measure transduction (FIG. 51C). The data show that complexes formed with either batch of MSPs were capable of activating T cells and mediating T cell transduction. It is worth noting that activation and transduction with MSPs shows a bell-shaped response. Without wishing to be bound by theory, high concentrations of MSPs in T cell cultures can have negative impacts on the T cell viability, and subsequently, can hamper activation and transduction efficiency.

[0848] A second in vitro study tested whether size reduction of MSPs, through either sonication or bead homogenization, would impact MSP performance. Isolated T cells were thawed and resuspended at 1e6 cells/mL in serum-free T cell media with 100 units/mL of IL-2 before being added to a 96-well plate. 60 mg of MSPs were resuspended at 30 mg/mL in DPBS. A portion of MSP solution was size-reduced by bead homogenization. Additionally, 30 mg of MSPs were resuspended at 5 mg/mL in sterile water, and then sonicated using a Q125 system (qSonica) sonication probe at an amplitude of 40% for a duration of two minutes (sonication performed in 15 sec intervals with 30 sec breaks). After sonication, MSPs were centrifuged to aspirate water and resuspended at 30 mg/mL in DPBS. 1.5 mg of full-sized or size-reduced MSPs were added to fresh Eppendorf tubes and an equal volume of DPBS was added to a separate Eppendorf tube as a soluble virus control. Then, 1.6 μg of the STARTERS molecule was added to MSPs or DPBS before 8e7 TU of thawed virus was added. The mixtures were incubated at 4° C. for one hour before serially diluted with T cell media and added to plated T cells. Components were co-cultured with T cells for three days before T cell activation and transduction were evaluated using flow cytometry.

[0849] GFP-encoding lentivirus and the STARTERS molecule were loaded onto full-size or size-reduced MSPs, where size reduction was achieved using bead homogenization or sonication of MSPs. The MSP-virus-STARTERS complexes were co-cultured with T cells for three days before flow cytometry analysis was performed for CD25 expression (activation) and GFP expression (transduction). Size reduction of MSPs did not negatively impact in vitro potency with respect to T cell activation (FIG. 52A) and transduction (FIG. 52B), and sonicated MSPs demonstrated the greatest peak transduction efficiency of MSP conditions tested.

[0850] Next, an in vivo study (FIG. 53A) was conducted to examine the use of the STARTERS molecule in in vivo CART manufacturing. Briefly, VEGF-C loaded cryogels (“injectable 1” in FIG. 53A) were injected at day −16 followed by a 20e6 human PBMC injection at day −14. 14 days later, different combinations of CD19 CAR-encoding virus and STARTERS molecules co-loaded onto MSPs (“injectable 2” in FIG. 53B) were injected intradermally above the cryogel location. Flow cytometry analysis was performed on blood from weekly bleeds and expansion of lymphocyte populations was assessed. On day 18, mice with significant CAR-T expansion were euthanized and circulating lymphocytes were harvested via cardiac puncture, analyzed for CAR % and cell count, pooled within the groups, and adoptively transferred into mice which had been challenged with 1e6 NALM6 cells 4 days prior. Weekly bleeds and bi-weekly luminescence imaging of tumors were performed until end of study. The aims of this study were to 1) elucidate the necessity of single components within each injectable, and 2) demonstrate the ability of in vivo manufactured CAR-Ts to control tumor burden.

[0851] As shown in FIG. 53C, in vivo manufactured CAR-Ts, when adoptively transferred into NALM6 tumor bearing mice, were able to recognize their target CD19 receptor and deplete B cells in these mice. As shown in FIG. 53D, tumors treated with transferred PBMCs from donor mice with no CARTs (“PBMC control” in FIG. 53D) showed comparable growth kinetics compared to untreated NALM6 tumors (“NALM6” in FIG. 53D). Mice treated with a dose of 3e5 CAR-Ts manufactured using free virus (“Free virus” in FIG. 53D) or MSP-delivered virus (“MSP virus” in FIG. 53D) show reduced tumor burden. These data show that in vivo-generated CARTs demonstrated strong anti-tumor activity in vivo.

[0852] Furthermore, expansion of in vivo-generated CARTs in circulation was examined. 13 days after intradermal injection of injectable 2 at the cryogel site, mice treated with a combination of VEGF-C cryogel, virus (MSP-deliver or free), and MSP-STARTERS showed comparable CART, shown by similar CAR percentage in total circulating T cells (FIG. 53E) and counts/μl of CART cells in blood (FIG. 53F). Mice treated without full treatment combination showed lower levels of CAR-T number and CAR+% (FIGS. 53E and 53F). 18 days after intradermal injection of injectable 2, despite similar amount of circulating T cells (FIG. 53H), mice treated with virus and STARTERS co-loaded onto MSPs had a higher CAR-T number (FIG. 531) and CAR+% (FIG. 53J) compared to mice treated with MSP-delivered STARTERS in combination with free virus. The day-18 data were used to determine the CAR+ cell number after pooling of blood lymphocytes to determine the number of cells dosed into mice bearing Nalm6 tumors.

[0853] FIGS. 53K and 53L show results from combined flow cytometry analysis of blood from mice used for adoptive transfer and remaining mice enrolled in the study. No significant difference in the number of circulating T cells was observed between groups (FIG. 53K). Full combination of injectable 1 and injectable 2 induced the highest absolute counts of CARTs in circulation (FIG. 53L).

### Example K: Use of HA-Hydrogel for Sustained Release of VEGF-C

[0854] This example describes the use of hyaluronic acid (HA)-hydrogel for sustained release of VEGF-C protein to achieve lymphangiogenesis and T-cell localization at an injection site.

### Example 1: Functionalization of Hyaluronic Acid

[chemical structure]

[0856] This example describes the synthesis of an azide functionalized hyaluronic acid, which is reacted with a crosslinking moiety to form a hydrogel.

### Synthesis of Hyaluronic Acid Intermediate [HA-N3]

[0857] Hyaluronic acid sodium salt is a linear polymer consisting of repeating dimeric units of glucuronic acid and N-acetylgalactosamine, with a repeating unit molecular weight of 401.3 Da. In this example the moles of hyaluronic acid reported refers to the moles of repeating unit and the equivalents of reagents used in the reaction with hyaluronic acid are reported relative to the moles of hyaluronic acid repeating unit. The average molecular weight of the polymer determines the average number of repeat units per polymer strand. Hyaluronic acid sodium salt was obtained from supplier Lifecore Biomedical with label HA700K-5 having a nominal average molecular weight of 700 kDa and may vary from batch to batch.

### Synthesis of 700 KD [HA-N3]-16%

[0858] A solution of hyaluronic acid, sodium salt (nominal average molecular weight 700 kDa; 258.9 mg, 0.62 mmol; Lifecore Biomedical, LLC; product number HA700K-5) was fully dissolved in 37.5 mL of MES buffer (50 mM, pH 5.5). To this solution was added 4-(4′,6′-dimethoxy-1′,3′,5′-triazin-2′-yl)-4-methylmorpholin-4-ium chloride (DMTMM, 298.1 mg, 1.077 mmol, 1.736 eq), followed after 5 min by addition of 11-azido-3,6,9-trioxaundecan-1-amine (201 mg, 0.921 mmol). The reaction was stirred overnight. A crude reaction mixture was filled into a dialysis membrane (MWCO 50 kDa), and dialyzed 1-3 days against 0.25 M NaCl, with several changes of the dialysis solution, followed by 1-3 day's dialysis against deionized water, also with multiple changes of the dialysis solution. Upon completion, the sample was removed from the dialysis tubing, flash-frozen, and lyophilized to get 700 kDa [HA-N3]-16%.

[0859] ¹H NMR (400 MHz, D₂O) δ 4.45 (bs, 1.71H), 4.0-3.1 (m, 16H), 1.95 (s, 3H).

[0860] DOSY-NMR. One dimensional diffusion ordered NMR spectra (DOSY) were collected using the stimulated echo with one spoil gradient pulse sequence (stegp1s1d) on a Bruker AVANCE III 400 MHz (for ¹H-NMR) instrument with 5 mm DCH cryoprobe. The diffusion time and the diffusion gradient time were set to 50 ms and 4 ms, respectively. Two spectra were collected with gradient strength (gpz6) set to 2% and 95%. Comparison of the two spectra showed no differences apart from the solvent peak, indicating no small molecule impurities were present in the polymer.

[0861] Elemental analysis of a purified sample showed the following elemental content—C: 38.9%: H: 5.42%; N: 4.85%.

[0862] The degree of substitution of the [HA-N₃] is defined as the % of repeat units in which the carboxylate moiety has undergone reaction to give the depicted amide. Elemental analysis was used to determine the degree of substitution. The [% C/% N] ratio determined by elemental analysis of a purified sample is entered into the following formula to provide the degree of substitution. Where y=[(% C)/(% N)]) then:

$$Degree of substitution = 100 \times \frac{\frac{14 \times 12.01}{14.01 \times y} - 1}{4 - \frac{8 \times 12.01}{14.01 \times y}}$$

[0863] In this example, the degree of substitution (DS) of [HA-N3] was 16%.

[0864] This 700 kDa hyaluronic acid, functionalized with 16% of the azide linker is labeled 700 kDa [HA-N3]-16%.

### Synthesis of 200 KD [HA-N₃]-24%

[0865] In another aspect, hyaluronic acid, sodium salt (nominal average molecular weight 200 kD) was reacted as described above in example 1.

[0866] ¹H NMR (400 MHz, D₂O) δ 4.45 (bs, 2H), 4.0-3.1 (m, 18H), 1.95 (s, 3H).

[0867] Elem. Anal: C: 39.94%: H: 5.53%; N: 5.73%.

[0868] In the rest of the examples, a 700 kDa and 200 kDa hyaluronic acid, functionalized with X % of the azide linker is labeled 700 kDa [HA-N₃]-X % and 200 kDa [HA-N₃]-X % respectively.

[0869] [HA-N₃] intermediates may also be purified by tangential flow filtration. The reaction mixture diluted with 25 mL of 0.25 M NaCl solution and purified by tangential flow filtration. Tangential flow filtration was carried out using a 30 kDa MWCO Vivaflow-50R Hydrosart cartridge (Sartorius), eluting with 400 mL of 0.25 M NaCl solution, then 400 mL of water. The product was flash frozen and lyophilized to get final product.

### Example 2: Synthesis of Crosslinkers (XL)

### XL-1 Synthesis

[chemical structure]

### XL-1a. PEG(2000)-bis-3-((tert-butoxycarbonyl)amino)-2-methylpropanoate

[chemical structure]

[0872] 3-((tert-butoxycarbonyl)amino)propanoic acid (0.152 g, 0.75 mmol) and Mn ˜2 kDa PEG (0.5 g, 0.250 mmol) was dissolved in 15 mL dichloromethane. Dimethylaminopyridine (0.015 g, 0.125 mmol) and EDC HCl (0.192 g, 1.003 mmol) were added and the reaction mixture was stirred at room temperature overnight. The crude product was purified by flash column chromatography on silica with a 0-15% dichloromethane:methanol gradient. The product containing fractions were combined and reduced to dryness to provide XL-1a. ¹H NMR (400 MHz, methanol-d4) δ 4.23 (m, 4H), 3.63 (m, 170H), 3.22 (m, 4H) 2.66 (m, 2H), 1.43 (s, 18H), 1.13 (m, 6H).

### XL-1b. PEG (2000)-bis-[methyl-3-amino-2-methylpropanoate], bis-trifluoroacetic acid

[chemical structure]

[0874] XL-1a (260 mg, 0.108 mmol) was dissolved in dichloromethane (3 mL). Trifluoroacetic acid was added (0.415 mL) and the reaction mixture was stirred at room temperature for 4h. The solvent was removed under reduced pressure. The crude product was triturated with Et₂O twice, then dried under vacuum to provide XL-1b. ¹H NMR (400 MHz, Methanol-d4) δ 4.45 (m, 2H), 4.22 (m, 2H), 3.59 (m, 177H), 3.12 (m, 4H) 2.87 (m, 2H), 1.22 (m, 6H).

### XL-1. PEG (2000)-bis 3-(((((1R,8S,9s)-bicyclo[6.1.0]non-4-yn-9-yl)methoxy)carbonyl)amino)-2-methylpropanoate

[chemical structure]

[0876] XL-1b (200 mg, 0.086 mmol) was dissolved in acetonitrile (3 mL). Triethylamine (0.599 mL, 4.30 mmol) was added, followed by ((1R,8S,9s)-bicyclo[6.1.0]non-4-yn-9-yl)methyl (2,5-dioxopyrrolidin-1-yl) carbonate (200 mg, 0.688 mmol) and the reaction mixture was stirred at room temperature for 4 h. The reaction mixture was directly purified by preparative reverse phase HPLC with ELSD triggered fraction collection (method below). The product containing fractions were pooled, frozen and lyophilized to provide XL-1. For storage purposes, XL-1 was kept as an acetonitrile, DMSO, or methanol solution in a freezer. Analytical HPLC-CAD (method below): retention time=2.75 min. 1H NMR (400 MHz, methanol-d4) δ 4.23 (m, 4H), 4.14 (m, 4H), 3.63 (m, 188H), 2.68 (m, 2H), 2.22 (m, 12H), 1.60 (m, 4H), 1.37 (m, 2H), 1.14 (m, 6H), 0.94 (m, 4H).

### XL-2 Synthesis

[chemical structure]

[0878] Mn ˜ 2 kDa PEG diamine hydrochloride (JenKem Technology, 300 mg, 0.148 mmol) was dissolved in acetonitrile (3 mL). Triethylamine (0.413 mL, 2.96 mmol) was added, followed by ((1R,8S,9s)-bicyclo[6.1.0]non-4-yn-9-yl)methyl (2,5-dioxopyrrolidin-1-yl) carbonate (345 mg, 1.184 mmol) and the reaction mixture was stirred at room temperature for 4 h. The reaction mixture was directly purified by preparative reverse phase HPLC with ELSD triggered fraction collection (method below). The product containing fractions were pooled, frozen and lyophilized to provide XL-2. For storage purposes, XL-2 was kept as an acetonitrile, DMSO, or methanol solution in a freezer. Analytical HPLC-CAD (method below): retention time=2.61 min. 1H NMR (400 MHz, methanol-d4) δ 4.14 (m, 4H), 3.63 (br s, 186H), 3.54 (m, 4H), 2.22 15 (m, 12H), 1.61 (m, 4H), 1.38 (m, 2H), 0.94 (m, 4H).

[0879] Preparative HPLC conditions: Waters XBridge C18; particle size: 5 m; column size: 19×250 mm; eluent/gradient: 5% CH₃CN/H₂O/0.5 min, 5-95% CH3CN/H₂O/12.5 min, 95% CH₃CN/H₂O/3 min; flow rate: 30 mL/min; column temperature: room temperature.

[0880] Analytical HPLC-CAD conditions: Waters ACQUITY UPLC BEH C18; particle size: 1.7 μm; column size: 2.1×50 mm; eluent/gradient: 2% CH₃CN/H₂O/0.5 min, 2-98% CH₃CN/H₂O/5 min (CH₃CN containing 0.1% formic acid and H₂O containing 0.1% formic acid); flow rate: 1 mL/min; column temperature: 50° C.

### Example 3: Preparation of HA-Hydrogel Formulations for In Vitro and In Vivo Studies

[0881] The crosslinker solution (50 mg/mL) prepared in Example 2 was dried under reduced pressure to remove the ACN (acetonitrile). The same amount of 1×PBS was added to the dry residue to get 50 mg/mL concentration of crosslinker in 1×PBS buffer. This freshly prepared solution was used for preparation of formulations for in vitro and in vivo studies.

H1a. In Situ Forming HA-Hydrogel Synthesis

[0882] 200 kDa [HA-N₃]-24% (122.4 mg, degree of substitution=24%) was dissolved in 7.26 mL 1×PBS buffer pH 7.4 (16.9 mg/mL, as weighed concentration) and stirred at room temperature overnight while protected from light. The molecular weight of the unsubstituted carboxylate sodium salt repeat dimer unit is 401.3 Da. The MW of the azidylated repeat dimer unit is 579.6 Da. The average MW of a dimer unit for the sodium salt form of 200 kDa [HA-N₃]-24% is 444.1 Da=((401.3×0.76)+(579.6×0.24)). Using the average MW of a sodium salt dimer unit, the total moles of repeat dimer unit is 276 μmol and the number of moles of azidylated repeat dimer unit is 66.2 μmol. 200 μL of 200 kDa HA-N₃-24% (3.38 mg, 7.61 μmol) was aliquoted from a stock solution and gelation was carried out by adding 10.4 μl of XL-2 crosslinker (0.52 mg, 0.221 μmol of reagent, 0.442 μmol of reactive functionality, 50 mg/mL in 1×PBS). This resulted in a solution with predicted crosslinking of 6.7% of the 200 kDa [HA-N3]-24% repeat units by the XL-2 ((0.442 μmol [XL-2-reactive functionality]/66.2 μmol [HAunits)×100=6.7%) The mixture was vortexed and 50 μl aliquot of the mixed solution was quickly added to an Eppendorf tube and stored at room temperature for overnight. The next day, visual inspection showed formation of Ha gel.

### H2a Hydrogel Synthesis

[0883] VEGF-C protein was mixed with 200 kDa [HA-N₃]-24% solution and a gelation reaction was performed with the crosslinker XL-2 as described above to prepare H2a gel.

### H3a Hydrogel Synthesis

[0884] VEGF-C protein was mixed with 200 kDa [HA-N₃]-24% solution and a gelation reaction was performed with the 2×amount of crosslinker XL-1 as described above to prepare H3a gel.

### H4a Hydrogel Synthesis

[0885] VEGF-C protein was mixed with 700 kDa [HA-N₃]-16% solution and a gelation reaction was performed with the 2×amount of crosslinker XL-2 as described above to prepare H4a gel.

### H5a Hydrogel Synthesis

[0886] VEGF-C protein was complexed with laponite XLG (BYK additives) prior to addition to 700 kDa [HA-N₃]-16% solution with laponite conc. 0.25 mg/mL in final gel. A gelation reaction was performed with the 2×amount of crosslinker XL-2 as described above to prepare H5a gel.

### H6a Hydrogel Synthesis

[0887] VEGF-C protein was complexed with laponite XLG (BYK additives) prior to addition to 700 kDa [HA-N₃]-16% solution with laponite conc. 1 mg/mL in final gel. A gelation reaction was performed with the 2×amount of crosslinker XL-2 as described above to prepare H6a gel.

[0888] H3b. HA Hydrogel Particles Synthesis 200 μL of H3a gel prepared as described above was forced through a 100 mesh stainless steel screen disc into a 1 mL syringe, yielding coarse gel particles. 100 μL of 1×PBS was added to this syringe, followed by vortexing to mix. The syringe was held at room temperature for 6 h to allow swelling of the hydrogel. The swollen, coarse gel particles of H3a were forced 20 times through a 200-mesh stainless steel screen disc, yielding fine gel particles to get H3b product.

### H5b Hydrogel Synthesis

[0889] H5a gel was extruded to fine gel particles to get final H5b product.

### H6b Hydrogel Synthesis

[0890] H6a gel was extruded to fine gel particles to get final H6b product.

### In Vitro Release Study Set Up

[0891] 950 μl PBS-2% BSA buffer was added to the 50 μL aliquot of hydrogel and incubated at 37° C. on 300 rpm shaking. 800 μl aliquots were taken out at different time points and no gel was removed at those time points. The study samples were replenished with same amount of 1×PBS-2% BSA buffer to keep the volume of study sample same. The release samples were then analyzed with ELISA for VEGF-C content.

### In Vivo Study Set Up

[0892] After all the components for preparation of H3a gel was mixed, the tube was vortexed and quickly filled in the back of insulin syringe. The sample was pushed inside the syringe with a plunger and any air bubbles formed was removed. 30 μL was injected intradermally in mice within 2-3 minutes of mixing.

### Results

[0893] Sustained release of VEGF-C was achieved in vitro using different compositions of HA-hydrogels (FIGS. 54A-54D). No difference was observed in the release curves for HA-hydrogels prepared with 700 kDa [HA-N₃]-16% and 200 kDa [HA-N₃]-24% (FIG. 54A). The VEGF-C release from HA-hydrogel formulations can be tuned by the addition of laponite. The laponite containing HA-hydrogel formulations provided concentration-dependent slower release of VEGF-C protein as compared to the formulations containing no laponite (FIG. 54B). The laponite containing in situ forming hydrogel and HA-hydrogel particles provided a similar release profile for VEGF-C protein (FIGS. 54C and 54D).

[0894] The in vivo study was performed with intradermal injection of H1a and H3a in situ forming hydrogels in mice. The VEGF-C containing formulation (H3a) showed an increase in lymphatic endothelial cells (LECs) and T4 cells after day 7 analysis as compared to the control (H1a) formulation (FIGS. 55A and 55B).

### EQUIVALENTS

[0895] The disclosures of each and every patent, patent application, and publication cited herein are hereby incorporated herein by reference in their entirety. While this invention has been disclosed with reference to certain embodiments, it is apparent that further embodiments and variations of this invention may be devised by others skilled in the art without departing from the true spirit and scope of the invention. The appended claims are intended to be construed to include all such embodiments and equivalent variations.

What is claimed is:

1. A plurality of compositions, comprising:
a first composition comprising:
a biomaterial and a cell recruitment factor; and
a second composition comprising:
a viral vector.

2. A first composition, comprising:
a biomaterial and a cell recruitment factor,
wherein the biomaterial comprises a hydrogel, e.g., a cryogel (e.g., an alginate cryogel) or a hyaluronic acid hydrogel (HA hydrogel), and
wherein the cell recruitment factor comprises an amino acid sequence according to SEQ ID NO: 741, or an amino acid sequence with at least 80%, 85%, 90%, 95%, or 99% sequence identity thereto, provided that the amino acid at position 26 of SEQ ID NO: 741 is not Cysteine (C), optionally wherein the amino acid at position 26 of SEQ ID NO: 741 is Alanine (A).

3. A method of transducing cells of a subject in vivo or treating a disease, disorder, or condition in a subject, the method comprising:
administering a biomaterial and a cell recruitment factor to a site (e.g., high subcutaneous space or subcutaneous space adjacent to dermis) in the subject, and
administering a viral vector or a nucleic acid comprising a transgene to the subject; thereby transducing cells of the subject with the transgene.

4. The method of claim 3, wherein the biomaterial and the cell recruitment factor are comprised in a first composition, and the viral vector or nucleic acid is comprised in a second composition.

5. The plurality of compositions of claim 1, or the method of any one of claims 3-4, wherein the biomaterial:
(i) comprises a hydrogel;
(ii) comprises a cryogel, e.g., an alginate cryogel;
(iii) comprises a hyaluronic acid hydrogel (HA hydrogel);
(iv) comprises a gelatin, hyaluronic acid, collagen, alginate, laminin, chitosan, silk fibroin, agarose, poly(ethylene glycol), poly-vinyl alcohol, and/or hydroxyethyl methylacrylate;
(v) comprises alginate hydrogel, optionally wherein the alginate hydrogel further comprises norbornene and/or tetrazine, optionally wherein the norbornene and/or tetrazine is covalently associated with, e.g., chemically linked to, or non-covalently associated with, e.g., adsorbed on, the alginate; and/or
(vi) comprises pores between about 10 μm to about 300 μm, e.g., between about 50 μm to about 300 μm, in diameter, or no pores; and/or
(vii) is chemically crosslinked.

6. The plurality of compositions, the first composition, or the method of any one of the preceding claims, wherein the first composition comprising the biomaterial further comprises laponite; or wherein the biomaterial is comprised within a first composition that further comprises laponite; optionally wherein the laponite is present at a concentration of about 0.15 mg/mL to about 0.35 mg/mL, e.g., about 0.25 mg/mL.

7. The plurality of compositions, the first composition, or the method of any one of the preceding claims, wherein the cell recruitment factor is:
(i) noncovalently associated with, e.g., adsorbed on, the biomaterial; or
(ii) covalently associated with, e.g., conjugated to, the biomaterial.

8. The plurality of compositions, the first composition, or the method of any one of the preceding claims, wherein the cell recruitment factor:
(i) induces lymphangiogenesis;
(ii) induce growth of lymphatic endothelial cells; and/or
(ii) recruits immune cells, optionally wherein the immune cells comprise T-cells and/or NK-cells.

9. The plurality of compositions, the first composition, or the method of claim 8, wherein induction of lymphangiogenesis:
(i) comprises an increase in the level of lymphatic endothelial cells (LECs) (e.g., CD45−CD31+PDPN+ cells), optionally wherein the level of LECs is increased by at least 10%, 20%, 30%, 40%, 50%, 60, 70%, 75%, 80%, 85%, 90%, 95%, 100%, or 200% as compared to a reference level (e.g., the level of LECs at a site in a subject prior to injection of the plurality of compositions or the first composition), when measured by an assay, e.g., a flow cytometry assay, e.g., as described in Example H or I; and/or
(ii) results in at least 50 LECs (e.g., at least 75, 100, 125, 150, 200, 225, or 250 LECs) per milligram of tissue when measured by an assay, e.g., a flow cytometry assay, e.g., as described in Example H or I.

10. The plurality of compositions, the first composition, or the method of any one of the preceding claims, wherein the cell recruitment factor recruits T cells, optionally wherein the T cells comprise naïve T cells (e.g., CD45RA+CD62L+ T cells or CD45RA+CD62L+CCR7+CD27+CD95+ T cells).

11. The plurality of compositions, the first composition, or the method of claim 10, wherein recruitment of T cells comprises an increase in the level of T cells, optionally wherein the level of T cells is increased by at least 10%, 20%, 30%, 40%, 50%, 60, 70%, 75%, 80%, 85%, 90%, 95%, 100%, 200%, or 300% as compared to a reference level (e.g., the level of T cells at a site in a subject prior to injection of the plurality of compositions or the first composition), when measured by an assay, e.g., a flow cytometry assay, e.g., as described in Example H or I.

12. The plurality of compositions of any one of claims 1 or 5-11, or the method of any one of claims 3-11, wherein the cell recruitment factor is chosen from VEGF-C, IL-2, IL-7, IL-15 (e.g., hetIL-15 (IL15/sIL-15Ra)), GM-CSF, CXCL12, CXC3L1, CCL19, CCL21, CXCL10, or CXCL11.

13. The plurality of compositions of any one of claims 1 or 5-12, or the method of any one of claims 3-12, wherein the cell recruitment factor comprises VEGF-C, optionally wherein the VEGF-C:
(i) comprises a mature VEGF-C peptide, optionally the minor or major mature form or a mutated variant thereof,
(ii) is a monomer or dimer; and/or
(iii) is present in an effective amount, optionally, in an amount of less than or about 1 mg, less than or about 10 mg, greater than or about 10 μg, greater than or about 1 μg, between about 1 μg and 1 mg, between about 10 μg and 1 mg, between about 1 μg and 10 mg, or between about 10 μg and 10 mg.

14. The plurality of compositions or the method of claim 13, wherein the VEGF-C comprises:
(i) an amino acid sequence of any one of the sequences provided in Table 18 or a sequence with at least 95% sequence identity thereto, optionally wherein the sequence comprises or does not comprise a linker (e.g., a glycine-serine linker) and/or a his tag; and/or
(ii) the amino acid substitution of C137A, numbered according to SEQ ID NO: 725.

15. The plurality of compositions of any one of claims 1 or 5-14 or the method of any one of claims 3-14, wherein the cell recruitment factor comprises:
(i) an amino acid sequence according to SEQ ID NO: 741, or an amino acid sequence with at least 80%, 85%, 90%, 95%, or 99% sequence identity thereto, provided that the amino acid at position 26 of SEQ ID NO: 741 is not Cysteine (C), optionally wherein the amino acid at position 26 of SEQ ID NO: 741 is Alanine (A);
(ii) the amino acid sequence according to SEQ ID NO: 743 or a sequence an amino acid sequence with at least 80%, 85%, 90%, 95%, or 99% sequence identity thereto;
(iii) the amino acid sequence according to SEQ ID NO: 740 or an amino acid sequence with at least 80%, 85%, 90%, 95%, or 99% sequence identity thereto;
(iv) the amino acid sequence according to SEQ ID NO: 736, or an amino acid sequence with at least 80%, 85%, 90%, 95%, or 99% sequence identity thereto;
(v) a linker, e.g., wherein the linker has a sequence of Gly-Ser, wherein optionally the linker is C-terminal of SEQ ID NO: 743 or a sequence having at least 80%, 85%, 90%, 95%, or 99% sequence identity thereto;
(vi) the amino acid sequence according to SEQ ID NO: 735, or an amino acid sequence with at least 80%, 85%, 90%, 95%, or 99% sequence identity thereto;
(vii) the amino acid sequence according to SEQ ID NO: 734, or an amino acid sequence with at least 80%, 85%, 90%, 95%, or 99% sequence identity thereto; and/or
(viii) the amino acid sequence according to SEQ ID NO: 733, or an amino acid sequence with at least 80%, 85%, 90%, 95%, or 99% sequence identity thereto.

16. The plurality of compositions of any one of claims 1 or 5-15 or the method of any one of claims 3-15, wherein the cell recruitment factor comprises VEGF-C or a functional variant thereof, IL-15 (e.g., hetIL-15 (IL15/sIL-15Ra)) or a functional variant thereof; TL-7 or a functional variant thereof; or a combination thereof.

17. The plurality of compositions of any one of claims 1 or 5-16, or the method of any one of claims 4-16, wherein the second composition further comprises a particle.

18. The plurality of compositions or the method of claim 17, wherein the particle is a mesoporous particle, a silica particle and/or a mesoporous silica particle, optionally wherein the mesoporous silica particle is a mesoporous silica rod.

19. A second composition comprising:
a mesoporous silica particle;
a viral vector; and
a cell activation agent.

20. The plurality of compositions or the method of claim 18, or the second composition of claim 19, wherein the mesoporous silica particle:
(i) comprises a surface modification, optionally wherein the surface modification comprises:
(a) a —OH (hydroxyl), amine, carboxylic acid, phosphonate, halide, azide, alkyne, epoxide, sulfhydryl, polyethyleneimine, a hydrophobic moiety, or salts thereof, optionally using a C₁ to C₂₀ alkyl or (—O(CH2-CH₂—)₁₋₂₅ linker;
(b) a primary, secondary, tertiary, or quaternary amine; and/or
(c) a polyethyleneimine having an average molecular weight of about 1000 to 20,000 Da, about 1,200 to 15,000 Da, about 1,500 to 12,000 Da, about 2,000 Da, about 3,000 Da, about 4,000 Da, about 5,000 Da, about 6,000 Da, about 7,000 Da, about 8,000 Da, about 9,000 Da, or about 10,000 Da, as measured by gel permeation chromatography (GPC);
(ii) is a trimethylammonium functionalized mesoporous silica particle, e.g., a N,N,N-trimethylpropan-1-ammonium functionalized mesoporous silica particle;
(iii) comprises a plurality of pores, optionally wherein the pores are between 2-50 nm in diameter; and/or
(iv) comprises a surface area of at least about 100 m²/g.

21. The plurality of compositions of any one of claims 1, 5-18, or 20, the second composition of claim 19 or 20, or the method of any one of claims 3-18 or 20, wherein:
(i) the viral vector is noncovalently, e.g., electrostatically, or covalently associated with the mesoporous silica particle; and/or
(ii) the cell activation agent is noncovalently or covalently associated with the mesoporous silica particle.

22. A method of transducing cells of a subject in vivo or treating a disease, disorder, or condition in a subject, the method comprising:
administering a viral vector or a nucleic acid comprising a transgene to a site in the subject,
wherein the subject has previously been administered a biomaterial and a cell recruitment factor in an amount sufficient to induce lymphangiogenesis and/or recruitment of T cells to the site in the subject;
thereby transducing the cells.

23. The method of claim 22, wherein the viral vector is noncovalently, e.g., electrostatically, or covalently associated with a particle, e.g., a mesoporous silica particle.

24. The plurality of compositions of any one of claims 1, 5-18, or 20-21, the second composition of any one of claims 19-21, or the method of any one of claims 3-18, or 20-23, wherein the viral vector comprises:
(i) a lentivirus, retrovirus, adenovirus, adeno-associated virus, or herpes virus; and/or
(ii) an expression vector comprising a recombinant polynucleotide comprising an expression control sequence operatively linked to a nucleotide sequence to be expressed.

25. The plurality of compositions, the second composition, or the method of claim 24, wherein the nucleotide sequence encodes: a chimeric antigen receptor (CAR), an engineered TCR, a cytokine, a chemokine, an shRNA, or a polypeptide engineered to target a tumor antigen.

26. The plurality of compositions, the second composition, or the method of claim 25, wherein the tumor antigen is selected from the group consisting of: TSHR, CD19, CD123, CD22, CD30, CD171, CS-1, CLL-1, CD33, EGFRvIII, GD2, GD3, BCMA, Tn Ag, PSMA, ROR1, FLT3, FAP, TAG72, CD38, CD44v6, CEA, EPCAM, B7H3, KIT, IL-13Ra2, Mesothelin, IL-11 Ra, PSCA, PRSS21, VEGFR2, LewisY, CD24, PDGFR-beta, SSEA-4, CD20, Folate receptor alpha, ERBB2 (Her2/neu), MUC1, EGFR, NCAM, Prostase, PAP, ELF2M, Ephrin B2, IGF-I receptor, CAIX, LMP2, gp100, bcr-abl, tyrosinase, EphA2, Fucosyl GM1, sLe, GM3, TGS5, HMWMAA, o-acetyl-GD2, Folate receptor beta, TEM1/CD248, TEM7R, CLDN6, GPRC5D, CXORF61, CD97, CD179a, ALK, Polysialic acid, PLAC1, GloboH, NY-BR-1, UPK2, HAVCR1, ADRB3, PANX3, GPR20, LY6K, OR51E2, TARP, WT1, NY-ESO-1, LAGE-1a, MAGE-A1, legumain, HPV E6,E7, MAGE A1, ETV6-AML, sperm protein 17, XAGE1, Tie 2, MAD-CT-1, MAD-CT-2, Fos-related antigen 1, p53, p53 mutant, prostein, survivin and telomerase, PCTA-1/Galectin 8, MelanA/MART1, Ras mutant, hTERT, sarcoma translocation breakpoints, ML-IAP, ERG (TMPRSS2 ETS fusion gene), NA17, PAX3, Androgen receptor, Cyclin B1, MYCN, RhoC, TRP-2, CYP1B1, BORIS, SART3, PAX5, OY-TES1, LCK, AKAP-4, SSX2, RAGE-1, human telomerase reverse transcriptase, RU1, RU2, intestinal carboxyl esterase, mut hsp70-2, CD79a, CD79b, CD72, LAIR1, FCAR, LILRA2, CD300LF, CLEC12A, BST2, EMR2, LY75, GPC3, FCRL5, IGLL1, and any combination thereof.

27. The plurality of compositions of any one of claims 1, 5-18, 20-21, or 24-26, the second composition of any one of claims 19-21 or 24-26, or the method of any one of claims 3-18 or 20-26, wherein the viral vector encodes a CAR that comprises an antigen binding domain, a transmembrane domain, a costimulatory signaling region, and a signaling domain, wherein:
(i) the antigen binding domain binds an antigen selected from the group consisting of CD19, CD123, CD22, CD20, EGFRvIII, BCMA, Mesothelin, CD33, CLL-1, and any combination thereof,
(ii) the transmembrane domain comprises a CD8 hinge;
(iii) the costimulatory signaling region is selected from a 4-1BB or CD28 costimulatory signaling domain; and/or
(iv) the signaling domain comprises a CD3 zeta signaling domain.

28. The plurality of compositions of any one of claims 1, 5-18, 20-21, or 24-27, or the method of any one of claims 4-18 or 20-27, wherein the second composition further comprises a cell activation agent.

29. The plurality of compositions or the method of claim 28, the second composition of any one of claims 19-21 or 24-27, wherein the cell activation agent:
(a) comprises an agent that stimulates CD3/TCR complex and/or an agent that stimulates a costimulatory molecule and/or growth factor receptor;
(b) is a multispecific binding molecule comprising: (i) an anti-CD3 binding domain, and (ii) a costimulatory molecule binding domain (e.g., an anti-CD2 binding domain or an anti-CD28 binding domain);
(c) the amino acid sequence of any heavy chain provided in Table 20, or an amino acid sequence with at least 95% sequence identity thereto; and/or the amino acid sequence of any light chain provided in Table 20, or an amino acid sequence with at least 95% sequence identity thereto; and/or
(d) is conjugated to or adsorbed on the particle, e.g., mesoporous silica particle.

30. The plurality of compositions, the method, or the second composition of claim 29, wherein:
(i) the anti-CD3 binding domain, e.g., an anti-CD3 scFv, is situated N-terminal of the costimulatory molecule binding domain, e.g., an anti-CD2 Fab or an anti-CD28 Fab; or
(ii) the anti-CD3 binding domain, e.g., an anti-CD3 scFv, is situated C-terminal of the costimulatory molecule binding domain, e.g., an anti-CD2 Fab or an anti-CD28 Fab, optionally wherein:
an Fc region is situated between the anti-CD3 binding domain and the costimulatory molecule binding domain; or
the multispecific binding molecule comprises a CH2, and the anti-CD3 binding domain is situated N-terminal of the CH2.

31. The plurality of compositions, the method, or the second composition of claim 29 or 30, wherein the multispecific binding molecule comprises:
(i) a first polypeptide comprising from N-terminal to C-terminal: VH of the anti-CD3 binding domain, VL of the anti-CD3 binding domain, VH of the costimulatory molecule binding domain, CH1, CH2, and CH3; and
(ii) a second polypeptide comprising from N-terminal to C-terminal: VL of the costimulatory molecule binding domain and CL.

32. The plurality of compositions, the method, or the second composition of claim 29 or 30, wherein the multispecific binding molecule comprises:
(i) a first polypeptide comprising from N-terminal to C-terminal: VH of the costimulatory molecule binding domain, CH1, CH2, CH3, VH of the anti-CD3 binding domain, and VL of the anti-CD3 binding domain; and
(ii) a second polypeptide comprising from N-terminal to C-terminal: VL of the costimulatory molecule binding domain and CL.

33. The plurality of compositions, the method, or the second composition of claim 29 or 30, wherein the multispecific binding molecule comprises:
(i) a first polypeptide comprising from N-terminal to C-terminal: VH of the costimulatory molecule binding domain, CH1, VH of the anti-CD3 binding domain, VL of the anti-CD3 binding domain, CH2, and CH3; and
(ii) a second polypeptide comprising from N-terminal to C-terminal: VL of the costimulatory molecule binding domain and CL.

34. The plurality of compositions, the method, or the second composition of claim 29 or 30, wherein the multispecific binding molecule comprises an Fc region comprising:
(i) a L234A, L235A, S267K, and P329A mutation (LALASKPA), numbered according to the Eu numbering system;
(ii) a L234A, L235A, and P329G mutation (LALAPG), numbered according to the Eu numbering system;
(iii) a G237A, D265A, P329A, and S267K mutation (GADAPASK), numbered according to the Eu numbering system;
(iv) a L234A, L235A, and G237A mutation (LALAGA), numbered according to the Eu numbering system;
(v) a D265A, P329A, and S267K mutation (DAPASK), numbered according to the Eu numbering system;
(vi) a G237A, D265A, and P329A mutation (GADAPA), numbered according to the Eu numbering system;
(vii) a L234A, L235A, and P329A mutation (LALAPA), numbered according to the Eu numbering system; or
(viii) an amino acid sequence of any of the Fc regions in Table 20 or an amino acid sequence having at least 95% identity thereto.

35. The plurality of compositions, the method, or the second composition of claim 29, 30, or 34, wherein the multispecific binding molecule comprises:
(i) a heavy chain comprising the amino acid sequence of any of SEQ ID NOs: 726, 893, or 895, or an amino acid sequence having at least 95% sequence identity thereto; and/or
(ii) a light chain comprising the amino acid sequence of any of SEQ ID NOs: 728, 730, 892, or 894, or an amino acid sequence having at least 95% sequence identity thereto.

36. The plurality of compositions, the method, or the second composition of any one of claims 29, 30, or 34-35, wherein the multispecific binding molecule comprises:
(i) a heavy chain comprising the amino acid sequence of SEQ ID NO: 726 or an amino acid sequence having at least 95% sequence identity thereto, and a light chain comprising the amino acid sequence of SEQ ID NO: 728, or an amino acid sequence having at least 95% sequence identity thereto;
(ii) a heavy chain comprising the amino acid sequence of SEQ ID NO: 726 or an amino acid sequence having at least 95% sequence identity thereto, and a light chain comprising the amino acid sequence of SEQ ID NO: 730, or an amino acid sequence having at least 95% sequence identity thereto;
(iii) a heavy chain comprising the amino acid sequence of SEQ ID NO: 1416 or an amino acid sequence having at least 95% sequence identity thereto, and a light chain comprising the amino acid sequence of SEQ ID NO: 728, or an amino acid sequence having at least 95% sequence identity thereto;
(iv) a heavy chain comprising the amino acid sequence of SEQ ID NO: 1416 or an amino acid sequence having at least 95% sequence identity thereto, and a light chain comprising the amino acid sequence of SEQ ID NO: 730, or an amino acid sequence having at least 95% sequence identity thereto;
(v) a heavy chain comprising the amino acid sequence of SEQ ID NO: 893 or an amino acid sequence having at least 95% sequence identity thereto, and a light chain comprising the amino acid sequence of SEQ ID NO: 892, or an amino acid sequence having at least 95% sequence identity thereto;
(vi) a heavy chain comprising the amino acid sequence of SEQ ID NO: 1417 or an amino acid sequence having at least 95% sequence identity thereto, and a light chain comprising the amino acid sequence of SEQ ID NO: 892, or an amino acid sequence having at least 95% sequence identity thereto; or
(vii) a heavy chain comprising the amino acid sequence of SEQ ID NO: 895 or an amino acid sequence having at least 95% sequence identity thereto, and a light chain comprising the amino acid sequence of SEQ ID NO: 894, or an amino acid sequence having at least 95% sequence identity thereto.

37. The plurality of compositions of any one of claims 1, 5-18, 20-21, or 24-36, or the method of any one of claims 4-18 or 20-36, wherein the second composition further comprises a first population of particles and a second population of particles, e.g., a first population of mesoporous silica particles and a second population of mesoporous silica particles, wherein the first population comprises the viral vector and the second population comprises a cell activation agent, e.g., wherein the viral vector is noncovalently associated with a particle of the first population and the cell activation agent is noncovalently associated with a particle of the second population.

38. The plurality of compositions of any one of claims 1, 5-18, 20-21, or 24-37, the first composition of any one of claims 2, or 6-11, or the second composition of any one of claims 19-21, 24-27, or 29-36, wherein the first or second composition is suitable for injectable use.

39. The plurality of compositions of any one of claims 1, 5-18, 20-21, or 24-38, the first composition of any one of claims 2, 6-11, or 38, or the second composition of any one of claims 19-21, 24-27, 29-36, or 38, which further comprises:
(i) a Tet2 inhibitor, optionally wherein the Tet2 inhibitor comprises: (1) a gene editing system targeted to one or more sites within the gene encoding Tet2, or its corresponding regulatory elements; (2) a nucleic acid (e.g., an siRNA or shRNA) that inhibits expression of Tet2; (3) a protein (e.g., a dominant negative, e.g., catalytically inactive) Tet2, or a binding partner of Tet2 (e.g., a dominant negative binding partner of Tet2); (4) a small molecule that inhibits expression and/or function of Tet2; (5) a nucleic acid encoding any of (1)-(3); or (6) any combination of (1)-(5); and/or
(ii) a ZBTB32 inhibitor, optionally wherein the ZBTB32 inhibitor comprises: (1) a gene editing system targeting the ZBTB32 gene or one or more components thereof, (2) a nucleic acid encoding one or more components of the gene editing system; or (3) a combination of (1) and (2). In an embodiment, the ZBTB32 inhibitor comprises: (1) a gene editing system targeting the ZBTB32 gene or one or more components thereof. In an embodiment, the ZBTB32 inhibitor comprises (2) a nucleic acid encoding one or more components of the gene editing system. In an embodiment, the ZBTB32 inhibitor comprises a combination of (1) and (2).

40. The method of any one of claims 3-18 or 20-37, which further comprises administering to the subject:
(i) a Tet2 inhibitor, optionally wherein the Tet2 inhibitor comprises: (1) a gene editing system targeted to one or more sites within the gene encoding Tet2, or its corresponding regulatory elements; (2) a nucleic acid (e.g., an siRNA or shRNA) that inhibits expression of Tet2; (3) a protein (e.g., a dominant negative, e.g., catalytically inactive) Tet2, or a binding partner of Tet2 (e.g., a dominant negative binding partner of Tet2); (4) a small molecule that inhibits expression and/or function of Tet2; (5) a nucleic acid encoding any of (1)-(3); or (6) any combination of (1)-(5); and/or
(ii) a ZBTB32 inhibitor, optionally wherein the ZBTB32 inhibitor comprises: (1) a gene editing system targeting the ZBTB32 gene or one or more components thereof, (2) a nucleic acid encoding one or more components of the gene editing system; or (3) a combination of (1) and (2). In an embodiment, the ZBTB32 inhibitor comprises: (1) a gene editing system targeting the ZBTB32 gene or one or more components thereof. In an embodiment, the ZBTB32 inhibitor comprises (2) a nucleic acid encoding one or more components of the gene editing system. In an embodiment, the ZBTB32 inhibitor comprises a combination of (1) and (2).

41. A method of transducing cells of a subject in vivo or treating a disease, disorder, or condition in a subject, comprising administering the first composition and the second composition of the plurality of compositions of any one of claims 1, 5-18, 20-21, or 24-39.

42. A method of transducing cells of a subject in vivo or treating a disease, disorder, or condition in a subject, comprising administering the first composition of any one of claims 2, 6-11, 38, or 39, and the second composition of any one of claims 19-21, 24-27, 29-36, or 38.

43. The method of any one of claims 3-18, 20-21, 24-37, or 40-42, wherein the first composition and the second composition are administered sequentially.

44. The method of any one of claims 3-18, 20-21, 24-37, or 40-43, wherein the first composition is administered prior to the administration of the second composition, optionally wherein:
(i) the first composition is administered about 1-4 weeks, e.g., about 2 weeks, prior to the administration of the second composition; or
(ii) the first composition is administered at least two weeks prior to the administration of the second composition.

45. The method of any one of claims 3-18, 20-21, 24-37, or 40-44, further comprising evaluating, e.g., measuring, lymphangiogenesis in a sample from the subject (e.g., a sample from or close to the site of administration), wherein lymphangiogenesis is measured after the administration of the first composition and/or prior to the administration of the second composition,
optionally wherein measuring lymphangiogenesis comprises acquiring a value for the level and/or activity of lymphatic endothelial cells (LECs) (e.g., CD45−CD31+PDPN+ cells) in the sample.

46. The method of any one of claims 3-18, 20-21, 24-37, or 40-45, further comprising evaluating, e.g., measuring, the recruitment of T cells in a sample from the subject (e.g., a sample from or close to the site of administration), wherein the recruitment of T cells is measured after the administration of the first composition and/or prior to the administration of the second composition,
optionally wherein measuring the recruitment of T cells comprises acquiring a value for the level and/or activity of T cells (e.g., naïve T cells, e.g., CD45RA+CD62L+ T cells and/or CD45RA+CD62L+CCR7+CD27+CD95+ T cells) in the sample.

47. The plurality of compositions of any one of claims 1, 5-18, 20-21, or 24-39 for use in a method of transducing cells of a subject in vivo or treating a disease, disorder, or condition in a subject.

48. The first composition of any one of claims 2, 6-11, 38, or 39, in combination with the second composition of any one of claims 19-21, 24-27, 29-36, or 38 for use in a method of transducing cells of a subject in vivo or treating a disease, disorder, or condition in a subject.

49. The second composition of any one of claims 19-21, 24-27, 29-36, or 38, in combination with the first composition of any one of claims 2, 6-11, 38, or 39, for use in a method of transducing cells of a subject in vivo or treating a disease, disorder, or condition in a subject.

50. The method of any one of claims 3-18, 20-37, or 40-46, wherein:
(i) the subject has or has been diagnosed with having a disease, disorder, or condition; and/or
(ii) the subject is a human.

51. The method of any one of claims 3-18, 20-37, 40-46, or 50, wherein the disease, disorder, or condition comprises:
(i) a cancer;
(ii) a hematological cancer, optionally wherein the hematological cancer comprises a leukemia or lymphoma;
(iii) a hematological cancer chosen from chronic lymphocytic leukemia (CLL), mantle cell lymphoma (MCL), multiple myeloma, acute lymphoid leukemia (ALL), Hodgkin lymphoma, B-cell acute lymphoid leukemia (BALL), T-cell acute lymphoid leukemia (TALL), small lymphocytic leukemia (SLL), B cell prolymphocytic leukemia, blastic plasmacytoid dendritic cell neoplasm, Burkitt©lymphoma, diffuse large B cell lymphoma (DLBCL), DLBCL associated with chronic inflammation, chronic myeloid leukemia, myeloproliferative neoplasms, follicular lymphoma, pediatric follicular lymphoma, hairy cell leukemia, small cell- or a large cell-follicular lymphoma, malignant lymphoproliferative conditions, MALT lymphoma (extranodal marginal zone lymphoma of mucosa-associated lymphoid tissue), Marginal zone lymphoma, myelodysplasia, myelodysplastic syndrome, non-Hodgkin lymphoma, plasmablastic lymphoma, plasmacytoid dendritic cell neoplasm, Waldenstrom macroglobulinemia, splenic marginal zone lymphoma, splenic lymphoma/leukemia, splenic diffuse red pulp small B-cell lymphoma, hairy cell leukemia-variant, lymphoplasmacytic lymphoma, a heavy chain disease, plasma cell myeloma, solitary plasmocytoma of bone, extraosseous plasmocytoma, nodal marginal zone lymphoma, pediatric nodal marginal zone lymphoma, primary cutaneous follicle center lymphoma, lymphomatoid granulomatosis, primary mediastinal (thymic) large B-cell lymphoma, intravascular large B-cell lymphoma, ALK+ large B-cell lymphoma, large B-cell lymphoma arising in HHV8-associated multicentric Castleman disease, primary effusion lymphoma, B-cell lymphoma, acute myeloid leukemia (AML), or unclassifiable lymphoma;
(iv) a solid cancer; or
(v) a solid cancer chosen from: one or more of mesothelioma, malignant pleural mesothelioma, non-small cell lung cancer, small cell lung cancer, squamous cell lung cancer, large cell lung cancer, pancreatic cancer, pancreatic ductal adenocarcinoma, esophageal adenocarcinoma, breast cancer, glioblastoma, ovarian cancer, colorectal cancer, prostate cancer, cervical cancer, skin cancer, melanoma, renal cancer, liver cancer, brain cancer, thymoma, sarcoma, carcinoma, uterine cancer, kidney cancer, gastrointestinal cancer, urothelial cancer, pharynx cancer, head and neck cancer, rectal cancer, esophagus cancer, or bladder cancer, or a metastasis thereof,
(vi) an autoimmune disease, optionally wherein the viral vector or nucleic acid encodes a CAR that binds to a B cell antigen, e.g., CD 19, CD20, CD22, CD123, FcRn5, FcRn2, BCMA, CS-1 and CD138.

52. A kit comprising the first composition and the second composition of the plurality of compositions of any one of claims 1, 5-18, 20-21, or 24-39.

53. The plurality of compositions of any one of claims 1, 5-18, 20-21, or 24-39, the method of any one of claims 3-18, 20-37, 40-46, or 50-51, or the second composition of any one of claims 19-21, 24-27, 29-36, or 38, wherein the viral vector or the nucleic acid encodes:
(i) a first CAR that binds to a B cell antigen and a second CAR that binds to (a) a solid tumor antigen, (b) a myeloid tumor antigen, or (c) an antigen of a hematological tumor not of B-cell lineage; or
(2) a CAR that comprises a first binding domain that binds to a B cell antigen and a second binding domain that binds to (a) a solid tumor antigen, (b) a myeloid tumor antigen, or (c) an antigen of a hematological tumor not of B-cell lineage.

54. The method of claim 53, wherein the disease, disorder, or condition is a solid tumor.

The application's sequence listing, which the Patent Office published only in electronic form, follows.

SEQUENCE LISTING (1417 sequences)

SEQ ID NO: 1 - DNA, 1184 bp, Artificial Sequence
  source: /note="Description of Artificial Sequence: Synthetic polynucleotide"
cgtgaggctccggtgcccgtcagtgggcagagcgcacatcgcccacagtccccgagaagttggggggaggggtcggcaattgaaccggtgcctagagaaggtggcgcggggtaaactgggaaagtgatgtcgtgtactggctccgcctttttcccgagggtgggggagaaccgtatataagtgcagtagtcgccgtgaacgttctttttcgcaacgggtttgccgccagaacacaggtaagtgccgtgtgtggttcccgcgggcctggcctctttacgggttatggcccttgcgtgccttgaattacttccacctggctgcagtacgtgattcttgatcccgagcttcgggttggaagtgggtgggagagttcgaggccttgcgcttaaggagccccttcgcctcgtgcttgagttgaggcctggcctgggcgctggggccgccgcgtgcgaatctggtggcaccttcgcgcctgtctcgctgctttcgataagtctctagccatttaaaatttttgatgacctgctgcgacgctttttttctggcaagatagtcttgtaaatgcgggccaagatctgcacactggtatttcggtttttggggccgcgggcggcgacggggcccgtgcgtcccagcgcacatgttcggcgaggcggggcctgcgagcgcggccaccgagaatcggacgggggtagtctcaagctggccggcctgctctggtgcctggcctcgcgccgccgtgtatcgccccgccctgggcggcaaggctggcccggtcggcaccagttgcgtgagcggaaagatggccgcttcccggccctgctgcagggagctcaaaatggaggacgcggcgctcgggagagcgggcgggtgagtcacccacacaaaggaaaagggcctttccgtcctcagccgtcgcttcatgtgactccacggagtaccgggcgccgtccaggcacctcgattagttctcgagcttttggagtacgtcgtctttaggttggggggaggggttttatgcgatggagtttccccacactgagtgggtggagactgaagttaggccagcttggcacttgatgtaattctccttggaatttgccctttttgagtttggatcttggttcattctcaagcctcagacagtggttcaaagtttttttcttccatttcaggtgtcgtga

SEQ ID NO: 2 - protein, 21 aa, Artificial Sequence
  source: /note="Description of Artificial Sequence: Synthetic peptide"
MALPVTALLLPLALLLHAARP

SEQ ID NO: 3 - DNA, 63 bp, Artificial Sequence
  source: /note="Description of Artificial Sequence: Synthetic oligonucleotide"
atggccctgcctgtgacagccctgctgctgcctctggctctgctgctgcatgccgctagaccc

SEQ ID NO: 4 - protein, 45 aa, Artificial Sequence
  source: /note="Description of Artificial Sequence: Synthetic polypeptide"
TTTPAPRPPTPAPTIASQPLSLRPEACRPAAGGAVHTRGLDFACD

SEQ ID NO: 5 - DNA, 135 bp, Artificial Sequence
  source: /note="Description of Artificial Sequence: Synthetic polynucleotide"
accacgacgccagcgccgcgaccaccaacaccggcgcccaccatcgcgtcgcagcccctgtccctgcgcccagaggcgtgccggccagcggcggggggcgcagtgcacacgagggggctggacttcgcctgtgat

SEQ ID NO: 6 - protein, 230 aa, Artificial Sequence
  source: /note="Description of Artificial Sequence: Synthetic polypeptide"
ESKYGPPCPPCPAPEFLGGPSVFLFPPKPKDTLMISRTPEVTCVVVDVSQEDPEVQFNWYVDGVEVHNAKTKPREEQFNSTYRVVSVLTVLHQDWLNGKEYKCKVSNKGLPSSIEKTISKAKGQPREPQVYTLPPSQEEMTKNQVSLTCLVKGFYPSDIAVEWESNGQPENNYKTTPPVLDSDGSFFLYSRLTVDKSRWQEGNVFSCSVMHEALHNHYTQKSLSLSLGKM

SEQ ID NO: 7 - DNA, 690 bp, Artificial Sequence
  source: /note="Description of Artificial Sequence: Synthetic polynucleotide"
gagagcaagtacggccctccctgccccccttgccctgcccccgagttcctgggcggacccagcgtgttcctgttcccccccaagcccaaggacaccctgatgatcagccggacccccgaggtgacctgtgtggtggtggacgtgtcccaggaggaccccgaggtccagttcaactggtacgtggacggcgtggaggtgcacaacgccaagaccaagccccgggaggagcagttcaatagcacctaccgggtggtgtccgtgctgaccgtgctgcaccaggactggctgaacggcaaggaatacaagtgtaaggtgtccaacaagggcctgcccagcagcatcgagaaaaccatcagcaaggccaagggccagcctcgggagccccaggtgtacaccctgccccctagccaagaggagatgaccaagaaccaggtgtccctgacctgcctggtgaagggcttctaccccagcgacatcgccgtggagtgggagagcaacggccagcccgagaacaactacaagaccaccccccctgtgctggacagcgacggcagcttcttcctgtacagccggctgaccgtggacaagagccggtggcaggagggcaacgtctttagctgctccgtgatgcacgaggccctgcacaaccactacacccagaagagcctgagcctgtccctgggcaagatg

SEQ ID NO: 8 - protein, 282 aa, Artificial Sequence
  source: /note="Description of Artificial Sequence: Synthetic polypeptide"
RWPESPKAQASSVPTAQPQAEGSLAKATTAPATTRNTGRGGEEKKKEKEKEEQEERETKTPECPSHTQPLGVYLLTPAVQDLWLRDKATFTCFVVGSDLKDAHLTWEVAGKVPTGGVEEGLLERHSNGSQSQHSRLTLPRSLWNAGTSVTCTLNHPSLPPQRLMALREPAAQAPVKLSLNLLASSDPPEAASWLLCEVSGFSPPNILLMWLEDQREVNTSGFAPARPPPQPGSTTFWAWSVLRVPAPPSPQPATYTCVVSHEDSRTLLNASRSLEVSYVTDH

SEQ ID NO: 9 - DNA, 847 bp, Artificial Sequence
  source: /note="Description of Artificial Sequence: Synthetic polynucleotide"
aggtggcccgaaagtcccaaggcccaggcatctagtgttcctactgcacagccccaggcagaaggcagcctagccaaagctactactgcacctgccactacgcgcaatactggccgtggcggggaggagaagaaaaaggagaaagagaaagaagaacaggaagagagggagaccaagacccctgaatgtccatcccatacccagccgctgggcgtctatctcttgactcccgcagtacaggacttgtggcttagagataaggccacctttacatgtttcgtcgtgggctctgacctgaaggatgcccatttgacttgggaggttgccggaaaggtacccacagggggggttgaggaagggttgctggagcgccattccaatggctctcagagccagcactcaagactcacccttccgagatccctgtggaacgccgggacctctgtcacatgtactctaaatcatcctagcctgcccccacagcgtctgatggcccttagagagccagccgcccaggcaccagttaagcttagcctgaatctgctcgccagtagtgatcccccagaggccgccagctggctcttatgcgaagtgtccggctttagcccgcccaacatcttgctcatgtggctggaggaccagcgagaagtgaacaccagcggcttcgctccagcccggcccccaccccagccgggttctaccacattctgggcctggagtgtcttaagggtcccagcaccacctagcccccagccagccacatacacctgtgttgtgtcccatgaagatagcaggaccctgctaaatgcttctaggagtctggaggtttcctacgtgactgaccatt

SEQ ID NO: 10 - protein, 10 aa, Artificial Sequence
  source: /note="Description of Artificial Sequence: Synthetic peptide"
GGGGSGGGGS

SEQ ID NO: 11 - DNA, 30 bp, Artificial Sequence
  source: /note="Description of Artificial Sequence: Synthetic oligonucleotide"
ggtggcggaggttctggaggtggaggttcc

SEQ ID NO: 12 - protein, 24 aa, Artificial Sequence
  source: /note="Description of Artificial Sequence: Synthetic peptide"
IYIWAPLAGTCGVLLLSLVITLYC

SEQ ID NO: 13 - DNA, 72 bp, Artificial Sequence
  source: /note="Description of Artificial Sequence: Synthetic oligonucleotide"
atctacatctgggcgcccttggccgggacttgtggggtccttctcctgtcactggttatcaccctttactgc

SEQ ID NO: 14 - protein, 42 aa, Artificial Sequence
  source: /note="Description of Artificial Sequence: Synthetic polypeptide"
KRGRKKLLYIFKQPFMRPVQTTQEEDGCSCRFPEEEEGGCEL

SEQ ID NO: 15 - DNA, 126 bp, Artificial Sequence
  source: /note="Description of Artificial Sequence: Synthetic polynucleotide"
aaacggggcagaaagaaactcctgtatatattcaaacaaccatttatgagaccagtacaaactactcaagaggaagatggctgtagctgccgatttccagaagaagaagaaggaggatgtgaactg

SEQ ID NO: 16 - protein, 48 aa, Artificial Sequence
  source: /note="Description of Artificial Sequence: Synthetic polypeptide"
QRRKYRSNKGESPVEPAEPCRYSCPREEEGSTIPIQEDYRKPEPACSP

SEQ ID NO: 17 - DNA, 123 bp, Artificial Sequence
  source: /note="Description of Artificial Sequence: Synthetic polynucleotide"
aggagtaagaggagcaggctcctgcacagtgactacatgaacatgactccccgccgccccgggcccacccgcaagcattaccagccctatgccccaccacgcgacttcgcagcctatcgctcc

SEQ ID NO: 18 - protein, 112 aa, Artificial Sequence
  source: /note="Description of Artificial Sequence: Synthetic polypeptide"
RVKFSRSADAPAYKQGQNQLYNELNLGRREEYDVLDKRRGRDPEMGGKPRRKNPQEGLYNELQKDKMAEAYSEIGMKGERRRGKGHDGLYQGLSTATKDTYDALHMQALPPR

SEQ ID NO: 19 - DNA, 336 bp, Artificial Sequence
  source: /note="Description of Artificial Sequence: Synthetic polynucleotide"
agagtgaagttcagcaggagcgcagacgcccccgcgtacaagcagggccagaaccagctctataacgagctcaatctaggacgaagagaggagtacgatgttttggacaagagacgtggccgggaccctgagatggggggaaagccgagaaggaagaaccctcaggaaggcctgtacaatgaactgcagaaagataagatggcggaggcctacagtgagattgggatgaaaggcgagcgccggaggggcaaggggcacgatggcctttaccagggtctcagtacagccaccaaggacacctacgacgcccttcacatgcaggccctgccccctcgc

SEQ ID NO: 20 - protein, 112 aa, Artificial Sequence
  source: /note="Description of Artificial Sequence: Synthetic polypeptide"
RVKFSRSADAPAYQQGQNQLYNELNLGRREEYDVLDKRRGRDPEMGGKPRRKNPQEGLYNELQKDKMAEAYSEIGMKGERRRGKGHDGLYQGLSTATKDTYDALHMQALPPR

SEQ ID NO: 21 - DNA, 336 bp, Artificial Sequence
  source: /note="Description of Artificial Sequence: Synthetic polynucleotide"
agagtgaagttcagcaggagcgcagacgcccccgcgtaccagcagggccagaaccagctctataacgagctcaatctaggacgaagagaggagtacgatgttttggacaagagacgtggccgggaccctgagatggggggaaagccgagaaggaagaaccctcaggaaggcctgtacaatgaactgcagaaagataagatggcggaggcctacagtgagattgggatgaaaggcgagcgccggaggggcaaggggcacgatggcctttaccagggtctcagtacagccaccaaggacacctacgacgcccttcacatgcaggccctgccccctcgc

SEQ ID NO: 22 - protein, 5 aa, Artificial Sequence
  source: /note="Description of Artificial Sequence: Synthetic peptide"
  source: /note="See specification as filed for detailed description of substitutions and preferred embodiments"
GGGGS

SEQ ID NO: 23 - DNA, 30 bp, Artificial Sequence; identical to SEQ ID NO: 11
  source: /note="Description of Artificial Sequence: Synthetic oligonucleotide"

SEQ ID NO: 24 - protein, 150 aa, Artificial Sequence [sequence omitted]

SEQ ID NO: 25 - DNA, 450 bp, Artificial Sequence
  source: /note="Description of Artificial Sequence: Synthetic polynucleotide"
cccggatggtttctggactctccggatcgcccgtggaatcccccaaccttctcaccggcactcttggttgtgactgagggcgataatgcgaccttcacgtgctcgttctccaacacctccgaatcattcgtgctgaactggtaccgcatgagcccgtcaaaccagaccgacaagctcgccgcgtttccggaagatcggtcgcaaccgggacaggattgtcggttccgcgtgactcaactgccgaatggcagagacttccacatgagcgtggtccgcgctaggcgaaacgactccgggacctacctgtgcggagccatctcgctggcgcctaaggcccaaatcaaagagagcttgagggccgaactgagagtgaccgagcgcagagctgaggtgccaactgcacatccatccccatcgcctcggcctgcggggcagtttcagaccctggtc

SEQ ID NO: 26 - protein, 394 aa, Artificial Sequence
  source: /note="Description of Artificial Sequence: Synthetic polypeptide"
MALPVTALLLPLALLLHAARPPGWFLDSPDRPWNPPTFSPALLVVTEGDNATFTCSFSNTSESFVLNWYRMSPSNQTDKLAAFPEDRSQPGQDCRFRVTQLPNGRDFHMSVVRARRNDSGTYLCGAISLAPKAQIKESLRAELRVTERRAEVPTAHPSPSPRPAGQFQTLVTTTPAPRPPTPAPTIASQPLSLRPEACRPAAGGAVHTRGLDFACDIYIWAPLAGTCGVLLLSLVITLYCKRGRKKLLYIFKQPFMRPVQTTQEEDGCSCRFPEEEEGGCELRVKFSRSADAPAYKQGQNQLYNELNLGRREEYDVLDKRRGRDPEMGGKPRRKNPQEGLYNELQKDKMAEAYSEIGMKGERRRGKGHDGLYQGLSTATKDTYDALHMQALPPR

SEQ ID NO: 27 - DNA, 1182 bp, Artificial Sequence
  source: /note="Description of Artificial Sequence: Synthetic polynucleotide"
atggccctccctgtcactgccctgcttctccccctcgcactcctgctccacgccgctagaccacccggatggtttctggactctccggatcgcccgtggaatcccccaaccttctcaccggcactcttggttgtgactgagggcgataatgcgaccttcacgtgctcgttctccaacacctccgaatcattcgtgctgaactggtaccgcatgagcccgtcaaaccagaccgacaagctcgccgcgtttccggaagatcggtcgcaaccgggacaggattgtcggttccgcgtgactcaactgccgaatggcagagacttccacatgagcgtggtccgcgctaggcgaaacgactccgggacctacctgtgcggagccatctcgctggcgcctaaggcccaaatcaaagagagcttgagggccgaactgagagtgaccgagcgcagagctgaggtgccaactgcacatccatccccatcgcctcggcctgcggggcagtttcagaccctggtcacgaccactccggcgccgcgcccaccgactccggccccaactatcgcgagccagcccctgtcgctgaggccggaagcatgccgccctgccgccggaggtgctgtgcatacccggggattggacttcgcatgcgacatctacatttgggctcctctcgccggaacttgtggcgtgctccttctgtccctggtcatcaccctgtactgcaagcggggtcggaaaaagcttctgtacattttcaagcagcccttcatgaggcccgtgcaaaccacccaggaggaggacggttgctcctgccggttccccgaagaggaagaaggaggttgcgagctgcgcgtgaagttctcccggagcgccgacgcccccgcctataagcagggccagaaccagctgtacaacgaactgaacctgggacggcgggaagagtacgatgtgctggacaagcggcgcggccgggaccccgaaatgggcgggaagcctagaagaaagaaccctcaggaaggcctgtataacgagctgcagaaggacaagatggccgaggcctactccgaaattgggatgaagggagagcggcggaggggaaaggggcacgacggcctgtaccaaggactgtccaccgccaccaaggacacatacgatgccctgcacatgcaggcccttccccctcgc

SEQ ID NO: 28 - protein, 40 aa, Artificial Sequence
  source: /note="Description of Artificial Sequence: Synthetic polypeptide"
  SITE (1)..(40): /note="This sequence may encompass 1-10 'Gly Gly Gly Ser' repeating units"
GGGSGGGSGGGSGGGSGGGSGGGSGGGSGGGSGGGSGGGS

SEQ ID NO: 29 - protein, 20 aa, Artificial Sequence
  source: /note="Description of Artificial Sequence: Synthetic peptide"
GGGGSGGGGSGGGGSGGGGS

SEQ ID NO: 30 - protein, 15 aa, Artificial Sequence
  source: /note="Description of Artificial Sequence: Synthetic peptide"
GGGGSGGGGSGGGGS

SEQ ID NO: 31 - protein, 4 aa, Artificial Sequence
  source: /note="Description of Artificial Sequence: Synthetic peptide"
GGGS

SEQ ID NO: 32-33 - skipped (2 entries)

SEQ ID NO: 34 - RNA, 5000 nt, Artificial Sequence
  source: /note="Description of Artificial Sequence: Synthetic polynucleotide"
  SITE (1)..(5000): /note="This sequence may encompass 50-5000 nucleotides"
  source: /note="See specification as filed for detailed description of substitutions and preferred embodiments"
aaaaaaaaaaaaaaaaaaaaaaaaaaaaaaaaaaaaaaaaaaaaaaaaaaaaaaaaaaaaaaaaaaaaaaaaaaaaaaaaaaaaaaaaaaaaaaaaaaaaaaaaaaaaaaaaaaaaaaaaaaaaaaaaaaaaaaaaaaaaaaaaaaaaaaaaaaaaaaaaaaaaaaaaaaaaaaaaaaaaaaaaaaaaaaaaaaaaaaaaaaaaaaaaaaaaaaaaaaaaaaaaaaaaaaaaaaaaaaaaaaaaaaaaaaaaaaaaaaaaaaaaaaaaaaaaaaaaaaaaaaaaaaaaaaaaaaaaaaaaaaaaaaaaaaaaaaaaaaaaaaaaaaaaaaaaaaaaaaaaaaaaaaaaaaaaaaaaaaaaaaaaaaaaaaaaaaaaaaaaaaaaaaaaaaaaaaaaaaaaaaaaaaaaaaaaaaaaaaaaaaaaaaaaaaaaaaaaaaaaaaaaaaaaaaaaaaaaaaaaaaaaaaaaaaaaaaaaaaaaaaaaaaaaaaaaaaaaaaaaaaaaaaaaaaaaaaaaaaaaaaaaaaaaaaaaaaaaaaaaaaaaaaaaaaaaaaaaaaaaaaaaaaaaaaaaaaaaaaaaaaaaaaaaaaaaaaaaaaaaaaaaaaaaaaaaaaaaaaaaaaaaaaaaaaaaaaaaaaaaaaaaaaaaaaaaaaaaaaaaaaaaaaaaaaaaaaaaaaaaaaaaaaaaaaaaaaaaaaaaaaaaaaaaaaaaaaaaaaaaaaaaaaaaaaaaaaaaaaaaaaaaaaaaaaaaaaaaaaaaaaaaaaaaaaaaaaaaaaaaaaaaaaaaaaaaaaaaaaaaaaaaaaaaaaaaaaaaaaaaaaaaaaaaaaaaaaaaaaaaaaaaaaaaaaaaaaaaaaaaaaaaaaaaaaaaaaaaaaaaaaaaaaaaaaaaaaaaaaaaaaaaaaaaaaaaaaaaaaaaaaaaaaaaaaaaaaaaaaaaaaaaaaaaaaaaaaaaaaaaaaaaaaaaaaaaaaaaaaaaaaaaaaaaaaaaaaaaaaaaaaaaaaaaaaaaaaaaaaaaaaaaaaaaaaaaaaaaaaaaaaaaaaaaaaaaaaaaaaaaaaaaaaaaaaaaaaaaaaaaaaaaaaaaaaaaaaaaaaaaaaaaaaaaaaaaaaaaaaaaaaaaaaaaaaaaaaaaaaaaaaaaaaaaaaaaaaaaaaaaaaaaaaaaaaaaaaaaaaaaaaaaaaaaaaaaaaaaaaaaaaaaaaaaaaaaaaaaaaaaaaaaaaaaaaaaaaaaaaaaaaaaaaaaaaaaaaaaaaaaaaaaaaaaaaaaaaaaaaaaaaaaaaaaaaaaaaaaaaaaaaaaaaaaaaaaaaaaaaaaaaaaaaaaaaaaaaaaaaaaaaaaaaaaaaaaaaaaaaaaaaaaaaaaaaaaaaaaaaaaaaaaaaaaaaaaaaaaaaaaaaaaaaaaaaaaaaaaaaaaaaaaaaaaaaaaaaaaaaaaaaaaaaaaaaaaaaaaaaaaaaaaaaaaaaaaaaaaaaaaaaaaaaaaaaaaaaaaaaaaaaaaaaaaaaaaaaaaaaaaaaaaaaaaaaaaaaaaaaaaaaaaaaaaaaaaaaaaaaaaaaaaaaaaaaaaaaaaaaaaaaaaaaaaaaaaaaaaaaaaaaaaaaaaaaaaaaaaaaaaaaaaaaaaaaaaaaaaaaaaaaaaaaaaaaaaaaaaaaaaaaaaaaaaaaaaaaaaaaaaaaaaaaaaaaaaaaaaaaaaaaaaaaaaaaaaaaaaaaaaaaaaaaaaaaaaaaaaaaaaaaaaaaaaaaaaaaaaaaaaaaaaaaaaaaaaaaaaaaaaaaaaaaaaaaaaaaaaaaaaaaaaaaaaaaaaaaaaaaaaaaaaaaaaaaaaaaaaaaaaaaaaaaaaaaaaaaaaaaaaaaaaaaaaaaaaaaaaaaaaaaaaaaaaaaaaaaaaaaaaaaaaaaaaaaaaaaaaaaaaaaaaaaaaaaaaaaaaaaaaaaaaaaaaaaaaaaaaaaaaaaaaaaaaaaaaaaaaaaaaaaaaaaaaaaaaaaaaaaaaaaaaaaaaaaaaaaaaaaaaaaaaaaaaaaaaaaaaaaaaaaaaaaaaaaaaaaaaaaaaaaaaaaaaaaaaaaaaaaaaaaaaaaaaaaaaaaaaaaaaaaaaaaaaaaaaaaaaaaaaaaaaaaaaaaaaaaaaaaaaaaaaaaaaaaaaaaaaaaaaaaaaaaaaaaaaaaaaaaaaaaaaaaaaaaaaaaaaaaaaaaaaaaaaaaaaaaaaaaaaaaaaaaaaaaaaaaaaaaaaaaaaaaaaaaaaaaaaaaaaaaaaaaaaaaaaaaaaaaaaaaaaaaaaaaaaaaaaaaaaaaaaaaaaaaaaaaaaaaaaaaaaaaaaaaaaaaaaaaaaaaaaaaaaaaaaaaaaaaaaaaaaaaaaaaaaaaaaaaaaaaaaaaaaaaaaaaaaaaaaaaaaaaaaaaaaaaaaaaaaaaaaaaaaaaaaaaaaaaaaaaaaaaaaaaaaaaaaaaaaaaaaaaaaaaaaaaaaaaaaaaaaaaaaaaaaaaaaaaaaaaaaaaaaaaaaaaaaaaaaaaaaaaaaaaaaaaaaaaaaaaaaaaaaaaaaaaaaaaaaaaaaaaaaaaaaaaaaaaaaaaaaaaaaaaaaaaaaaaaaaaaaaaaaaaaaaaaaaaaaaaaaaaaaaaaaaaaaaaaaaaaaaaaaaaaaaaaaaaaaaaaaaaaaaaaaaaaaaaaaaaaaaaaaaaaaaaaaaaaaaaaaaaaaaaaaaaaaaaaaaaaaaaaaaaaaaaaaaaaaaaaaaaaaaaaaaaaaaaaaaaaaaaaaaaaaaaaaaaaaaaaaaaaaaaaaaaaaaaaaaaaaaaaaaaaaaaaaaaaaaaaaaaaaaaaaaaaaaaaaaaaaaaaaaaaaaaaaaaaaaaaaaaaaaaaaaaaaaaaaaaaaaaaaaaaaaaaaaaaaaaaaaaaaaaaaaaaaaaaaaaaaaaaaaaaaaaaaaaaaaaaaaaaaaaaaaaaaaaaaaaaaaaaaaaaaaaaaaaaaaaaaaaaaaaaaaaaaaaaaaaaaaaaaaaaaaaaaaaaaaaaaaaaaaaaaaaaaaaaaaaaaaaaaaaaaaaaaaaaaaaaaaaaaaaaaaaaaaaaaaaaaaaaaaaaaaaaaaaaaaaaaaaaaaaaaaaaaaaaaaaaaaaaaaaaaaaaaaaaaaaaaaaaaaaaaaaaaaaaaaaaaaaaaaaaaaaaaaaaaaaaaaaaaaaaaaaaaaaaaaaaaaaaaaaaaaaaaaaaaaaaaaaaaaaaaaaaaaaaaaaaaaaaaaaaaaaaaaaaaaaaaaaaaaaaaaaaaaaaaaaaaaaaaaaaaaaaaaaaaaaaaaaaaaaaaaaaaaaaaaaaaaaaaaaaaaaaaaaaaaaaaaaaaaaaaaaaaaaaaaaaaaaaaaaaaaaaaaaaaaaaaaaaaaaaaaaaaaaaaaaaaaaaaaaaaaaaaaaaaaaaaaaaaaaaaaaaaaaaaaaaaaaaaaaaaaaaaaaaaaaaaaaaaaaaaaaaaaaaaaaaaaaaaaaaaaaaaaaaaaaaaaaaaaaaaaaaaaaaaaaaaaaaaaaaaaaaaaaaaaaaaaaaaaaaaaaaaaaaaaaaaaaaaaaaaaaaaaaaaaaaaaaaaaaaaaaaaaaaaaaaaaaaaaaaaaaaaaaaaaaaaaaaaaaaaaaaaaaaaaaaaaaaaaaaaaaaaaaaaaaaaaaaaaaaaaaaaaaaaaaaaaaaaaaaaaaaaaaaaaaaaaaaaaaaaaaaaaaaaaaaaaaaaaaaaaaaaaaaaaaaaaaaaaaaaaaaaaaaaaaaaaaaaaaaaaaaaaaaaaaaaaaaaaaaaaaaaaaaaaaaaaaaaaaaaaaaaaaaaaaaaaaaaaaaaaaaaaaaaaaaaaaaaaaaaaaaaaaaaaaaaaaaaaaaaaaaaaaaaaaaaaaaaaaaaaaaaaaaaaaaaaaaaaaaaaaaaaaaaaaaaaaaaaaaaaaaaaaaaaaaaaaaaaaaaaaaaaaaaaaaaaaaaaaaaaaaaaaaaaaaaaaaaaaaaaaaaaaaaaaaaaaaaaaaaaaaaaaaaaaaaaaaaaaaaaaaaaaaaaaaaaaaaaaaaaaaaaaaaaaaaaaaaaaaaaaaaaaaaaaaaaaaaaaaaaaaaaaaaaaaaaaaaaaaaaaaaaaaaaaaaaaaaaaaaaaaaaaaaaaaaaaaaaaaaaaaaaaaaaaaaaaaaaaaaaaaaaaaaaaaaaaaaaaaaaaaaaaaaaaaaaaaaaaaaaaaaaaaaaaaaaaaaaaaaaaaaaaaaaaaaaaaaaaaaaaaaaaaaaaaaaaaaaaaaaaaaaaaaaaaaaaaaaaaaaaaaaaaaaaaaaaaaaaaaaaaaaaaaaaaaaaaaaaaaaaaaaaaaaaaaaaaaaaaaaaaaaaaaaaaaaaaaaaaaaaaaaaaaaaaaaaaaaaaaaaaaaaaaaaaaaaaaaaaaaaaaaaaaaaaaaaaaaaaaaaaaaaaaaaaaaaaaaaaaaaaaaaaaaaaaaaaaaaaaaaaaaaaaaaaaaaaaaaaaaaaaaaaaaaaaaaaaaaaaaaaaaaaaaaaaaaaaaaaaaaaaaaaaaaaaaaaaaaaaaaaaaaaaaaaaaaaaaaaaaaaaaaaaaaaaaaaaaaaaaaaaaaaaaaaaaaaaaaaaaaaaaaaaaaaaaaaaaaaaaaaaaaaaaaaaaaaaaaaaaaaaaaaaaaaaaaaaaaaaaaaaaaaaaaaaaaaaaaaaaaaaaaaaaaaaaaaaaaaaaaaaaaaaaaaaaaaaaaaaaaaaaaaaaaaaaaaaaaaaaaaaaaaaaaaaaaaaaaaaaaaaaaaaaaaaaaaaaaaaaaaaaaaaaaaaaaaaaaaaaaaaaaaaaaaaaaaaaaaaaaaaaaaaaaaaaaaaaaaaaaaaaaaaaaaaaaaaaaaaaaaaaaaaaaaaaaaaaaaaaaaaaaaaaaaaaaaaaaaaaaaaaaaaaaaaaaaaaaaaaaaaaaaaaaaaaaaaaaaaaaaaaaaaaaaaaaaaaaaaaaaaaaaaaaaaaaaaaaaaaaaaaaaa

SEQ ID NO: 35-38 - skipped (4 entries)

SEQ ID NO: 39 - protein, 373 aa, Artificial Sequence
  source: /note="Description of Artificial Sequence: Synthetic polypeptide"
PGWFLDSPDRPWNPPTFSPALLVVTEGDNATFTCSFSNTSESFVLNWYRMSPSNQTDKLAAFPEDRSQPGQDCRFRVTQLPNGRDFHMSVVRARRNDSGTYLCGAISLAPKAQIKESLRAELRVTERRAEVPTAHPSPSPRPAGQFQTLVTTTPAPRPPTPAPTIASQPLSLRPEACRPAAGGAVHTRGLDFACDIYIWAPLAGTCGVLLLSLVITLYCKRGRKKLLYIFKQPFMRPVQTTQEEDGCSCRFPEEEEGGCELRVKFSRSADAPAYKQGQNQLYNELNLGRREEYDVLDKRRGRDPEMGGKPRRKNPQEGLYNELQKDKMAEAYSEIGMKGERRRGKGHDGLYQGLSTATKDTYDALHMQALPPR

SEQ ID NO: 40-43 - skipped (4 entries)

SEQ ID NO: 44 - protein, 5 aa, Artificial Sequence
  source: /note="Description of Artificial Sequence: Synthetic peptide"
SYAMS

SEQ ID NO: 45 - protein, 17 aa, Artificial Sequence
  source: /note="Description of Artificial Sequence: Synthetic peptide"
AISGSGGSTYYADSVKG

SEQ ID NO: 46 - protein, 14 aa, Artificial Sequence
  source: /note="Description of Artificial Sequence: Synthetic peptide"
REWVPYDVSWYFDY

SEQ ID NO: 47 - protein, 7 aa, Artificial Sequence
  source: /note="Description of Artificial Sequence: Synthetic peptide"
GFTFSSY

SEQ ID NO: 48 - protein, 6 aa, Artificial Sequence
  source: /note="Description of Artificial Sequence: Synthetic peptide"
SGSGGS

SEQ ID NO: 49 - protein, 8 aa, Artificial Sequence
  source: /note="Description of Artificial Sequence: Synthetic peptide"
GFTFSSYA

SEQ ID NO: 50 - protein, 8 aa, Artificial Sequence
  source: /note="Description of Artificial Sequence: Synthetic peptide"
ISGSGGST

SEQ ID NO: 51 - protein, 16 aa, Artificial Sequence
  source: /note="Description of Artificial Sequence: Synthetic peptide"
ARREWVPYDVSWYFDY

SEQ ID NO: 52 - protein, 123 aa, Artificial Sequence
  source: /note="Description of Artificial Sequence: Synthetic polypeptide"
EVQLLESGGGLVQPGGSLRLSCAASGFTFSSYAMSWVRQAPGKGLEWVSAISGSGGSTYYADSVKGRFTISRDNSKNTLYLQMNSLRAEDTAVYYCARREWVPYDVSWYFDYWGQGTLVTVSS

SEQ ID NO: 53 - DNA, 369 bp, Artificial Sequence
  source: /note="Description of Artificial Sequence: Synthetic polynucleotide"
gaagtgcagttgctggagtcaggcggaggactggtgcagcccggaggatcgcttcgcttgagctgcgcagcctcaggctttaccttctcctcctacgccatgtcctgggtcagacaggctcccgggaagggactggaatgggtgtccgccattagcggttccggcggaagcacttactatgccgactctgtgaagggccgcttcactatctcccgggacaactccaagaacaccctgtatctccaaatgaattccctgagggccgaagataccgcggtgtactactgcgctagacgggagtgggtgccctacgatgtcagctggtacttcgactactggggacagggcactctcgtgactgtgtcctcc

SEQ ID NO: 54 - protein, 11 aa, Artificial Sequence
  source: /note="Description of Artificial Sequence: Synthetic peptide"
RASQSISSYLN

SEQ ID NO: 55 - protein, 7 aa, Artificial Sequence
  source: /note="Description of Artificial Sequence: Synthetic peptide"
AASSLQS

SEQ ID NO: 56 - protein, 9 aa, Artificial Sequence
  source: /note="Description of Artificial Sequence: Synthetic peptide"
QQSYSTPLT

SEQ ID NO: 57 - protein, 7 aa, Artificial Sequence
  source: /note="Description of Artificial Sequence: Synthetic peptide"
SQSISSY

SEQ ID NO: 58 - protein, 3 aa, Artificial Sequence
  source: /note="Description of Artificial Sequence: Synthetic peptide"
AAS

SEQ ID NO: 59 - protein, 6 aa, Artificial Sequence
  source: /note="Description of Artificial Sequence: Synthetic peptide"
SYSTPL

SEQ ID NO: 60 - protein, 6 aa, Artificial Sequence
  source: /note="Description of Artificial Sequence: Synthetic peptide"
QSISSY

SEQ ID NO: 61 - protein, 107 aa, Artificial Sequence [sequence omitted]

SEQ ID NO: 62 - DNA, 321 bp, Artificial Sequence
  source: /note="Description of Artificial Sequence: Synthetic polynucleotide"
gacattcaaatgactcagtccccgtcctccctctccgcctccgtgggagatcgcgtcacgatcacgtgcagggccagccagagcatctccagctacctgaactggtaccagcagaagccagggaaggcaccgaagctcctgatctacgccgctagctcgctgcagtccggcgtcccttcacggttctcgggatcgggctcaggcaccgacttcaccctgaccattagcagcctgcagccggaggacttcgcgacatactactgtcagcagtcatactccacccctctgaccttcggccaagggaccaaagtggagatcaag

SEQ ID NO: 63 - protein, 20 aa, Artificial Sequence
  source: /note="Description of Artificial Sequence: Synthetic peptide"
GGGGSGGGGSGGGGSGGGGS

SEQ ID NO: 64 - protein, 250 aa, Artificial Sequence
  source: /note="Description of Artificial Sequence: Synthetic polypeptide"
EVQLLESGGGLVQPGGSLRLSCAASGFTFSSYAMSWVRQAPGKGLEWVSAISGSGGSTYYADSVKGRFTISRDNSKNTLYLQMNSLRAEDTAVYYCARREWVPYDVSWYFDYWGQGTLVTVSSGGGGSGGGGSGGGGSGGGGSDIQMTQSPSSLSASVGDRVTITCRASQSISSYLNWYQQKPGKAPKLLIYAASSLQSGVPSRFSGSGSGTDFTLTISSLQPEDFATYYCQQSYSTPLTFGQGTKVEIK

SEQ ID NO: 65 - DNA, 750 bp, Artificial Sequence
  source: /note="Description of Artificial Sequence: Synthetic polynucleotide"
gaagtgcagttgctggagtcaggcggaggactggtgcagcccggaggatcgcttcgcttgagctgcgcagcctcaggctttaccttctcctcctacgccatgtcctgggtcagacaggctcccgggaagggactggaatgggtgtccgccattagcggttccggcggaagcacttactatgccgactctgtgaagggccgcttcactatctcccgggacaactccaagaacaccctgtatctccaaatgaattccctgagggccgaagataccgcggtgtactactgcgctagacgggagtgggtgccctacgatgtcagctggtacttcgactactggggacagggcactctcgtgactgtgtcctccggtggtggtggatcggggggtggtggttcgggcggaggaggatctggaggaggagggtcggacattcaaatgactcagtccccgtcctccctctccgcctccgtgggagatcgcgtcacgatcacgtgcagggccagccagagcatctccagctacctgaactggtaccagcagaagccagggaaggcaccgaagctcctgatctacgccgctagctcgctgcagtccggcgtcccttcacggttctcgggatcgggctcaggcaccgacttcaccctgaccattagcagcctgcagccggaggacttcgcgacatactactgtcagcagtcatactccacccctctgaccttcggccaagggaccaaagtggagatcaag

SEQ ID NO: 66 - protein, 473 aa, Artificial Sequence
  source: /note="Description of Artificial Sequence: Synthetic polypeptide"
EVQLLESGGGLVQPGGSLRLSCAASGFTFSSYAMSWVRQAPGKGLEWVSAISGSGGSTYYADSVKGRFTISRDNSKNTLYLQMNSLRAEDTAVYYCARREWVPYDVSWYFDYWGQGTLVTVSSGGGGSGGGGSGGGGSGGGGSDIQMTQSPSSLSASVGDRVTITCRASQSISSYLNWYQQKPGKAPKLLIYAASSLQSGVPSRFSGSGSGTDFTLTISSLQPEDFATYYCQQSYSTPLTFGQGTKVEIKTTTPAPRPPTPAPTIASQPLSLRPEACRPAAGGAVHTRGLDFACDIYIWAPLAGTCGVLLLSLVITLYCKRGRKKLLYIFKQPFMRPVQTTQEEDGCSCRFPEEEEGGCELRVKFSRSADAPAYQQGQNQLYNELNLGRREEYDVLDKRRGRDPEMGGKPRRKNPQEGLYNELQKDKMAEAYSEIGMKGERRRGKGHDGLYQGLSTATKDTYDALHMQALPPR

SEQ ID NO: 67 - DNA, 1419 bp, Artificial Sequence
  source: /note="Description of Artificial Sequence: Synthetic polynucleotide"
gaagtgcagttgctggagtcaggcggaggactggtgcagcccggaggatcgcttcgcttgagctgcgcagcctcaggctttaccttctcctcctacgccatgtcctgggtcagacaggctcccgggaagggactggaatgggtgtccgccattagcggttccggcggaagcacttactatgccgactctgtgaagggccgcttcactatctcccgggacaactccaagaacaccctgtatctccaaatgaattccctgagggccgaagataccgcggtgtactactgcgctagacgggagtgggtgccctacgatgtcagctggtacttcgactactggggacagggcactctcgtgactgtgtcctccggtggtggtggatcggggggtggtggttcgggcggaggaggatctggaggaggagggtcggacattcaaatgactcagtccccgtcctccctctccgcctccgtgggagatcgcgtcacgatcacgtgcagggccagccagagcatctccagctacctgaactggtaccagcagaagccagggaaggcaccgaagctcctgatctacgccgctagctcgctgcagtccggcgtcccttcacggttctcgggatcgggctcaggcaccgacttcaccctgaccattagcagcctgcagccggaggacttcgcgacatactactgtcagcagtcatactccacccctctgaccttcggccaagggaccaaagtggagatcaagaccactaccccagcaccgaggccacccaccccggctcctaccatcgcctcccagcctctgtccctgcgtccggaggcatgtagacccgcagctggtggggccgtgcatacccggggtcttgacttcgcctgcgatatctacatttgggcccctctggctggtacttgcggggtcctgctgctttcactcgtgatcactctttactgtaagcgcggtcggaagaagctgctgtacatctttaagcaacccttcatgaggcctgtgcagactactcaagaggaggacggctgttcatgccggttcccagaggaggaggaaggcggctgcgaactgcgcgtgaaattcagccgcagcgcagatgctccagcctaccagcaggggcagaaccagctctacaacgaactcaatcttggtcggagagaggagtacgacgtgctggacaagcggagaggacgggacccagaaatgggcgggaagccgcgcagaaagaatccccaagagggcctgtacaacgagctccaaaaggataagatggcagaagcctatagcgagattggtatgaaaggggaacgcagaagaggcaaaggccacgacggactgtaccagggactcagcaccgccaccaaggacacctatgacgctcttcacatgcaggccctgccgcctcgg

SEQ ID NO: 68 - protein, 12 aa, Artificial Sequence
  source: /note="Description of Artificial Sequence: Synthetic peptide"
REWWYDDWYLDY

SEQ ID NO: 69 - protein, 14 aa, Artificial Sequence
  source: /note="Description of Artificial Sequence: Synthetic peptide"
ARREWWYDDWYLDY

SEQ ID NO: 70 - protein, 121 aa, Artificial Sequence
  source: /note="Description of Artificial Sequence: Synthetic polypeptide"
EVQLLESGGGLVQPGGSLRLSCAASGFTFSSYAMSWVRQAPGKGLEWVSAISGSGGSTYYADSVKGRFTISRDNSKNTLYLQMNSLRAEDTAVYYCARREWWYDDWYLDYWGQGTLVTVSS

SEQ ID NO: 71 - DNA, 363 bp, Artificial Sequence
  source: /note="Description of Artificial Sequence: Synthetic polynucleotide"
gaagtgcagttgctggagtcaggcggaggactggtgcagcccggaggatcgcttcgcttgagctgcgcagcctcaggctttaccttctcctcctacgccatgtcctgggtcagacaggctcccgggaagggactggaatgggtgtccgccattagcggttccggcggaagcacttactatgccgactctgtgaagggccgcttcactatctcccgggacaactccaagaacaccctgtatctccaaatgaattccctgagggccgaagataccgcggtgtactactgcgctagacgggagtggtggtacgacgattggtacctggactactggggacagggcactctcgtgactgtgtcctcc

SEQ ID NO: 72 - protein, 248 aa, Artificial Sequence
  source: /note="Description of Artificial Sequence: Synthetic polypeptide"
EVQLLESGGGLVQPGGSLRLSCAASGFTFSSYAMSWVRQAPGKGLEWVSAISGSGGSTYYADSVKGRFTISRDNSKNTLYLQMNSLRAEDTAVYYCARREWWYDDWYLDYWGQGTLVTVSSGGGGSGGGGSGGGGSGGGGSDIQMTQSPSSLSASVGDRVTITCRASQSISSYLNWYQQKPGKAPKLLIYAASSLQSGVPSRFSGSGSGTDFTLTISSLQPEDFATYYCQQSYSTPLTFGQGTKVEIK

SEQ ID NO: 73 - DNA, 744 bp, Artificial Sequence
  source: /note="Description of Artificial Sequence: Synthetic polynucleotide"
gaagtgcagttgctggagtcaggcggaggactggtgcagcccggaggatcgcttcgcttgagctgcgcagcctcaggctttaccttctcctcctacgccatgtcctgggtcagacaggctcccgggaagggactggaatgggtgtccgccattagcggttccggcggaagcacttactatgccgactctgtgaagggccgcttcactatctcccgggacaactccaagaacaccctgtatctccaaatgaattccctgagggccgaagataccgcggtgtactactgcgctagacgggagtggtggtacgacgattggtacctggactactggggacagggcactctcgtgactgtgtcctccggtggtggtggatcggggggtggtggttcgggcggaggaggatctggaggaggagggtcggacattcaaatgactcagtccccgtcctccctctccgcctccgtgggagatcgcgtcacgatcacgtgcagggccagccagagcatctccagctacctgaactggtaccagcagaagccagggaaggcaccgaagctcctgatctacgccgctagctcgctgcagtccggcgtcccttcacggttctcgggatcgggctcaggcaccgacttcaccctgaccattagcagcctgcagccggaggacttcgcgacatactactgtcagcagtcatactccacccctctgaccttcggccaagggaccaaagtggagatcaag

SEQ ID NO: 74 - protein, 471 aa, Artificial Sequence
  source: /note="Description of Artificial Sequence: Synthetic polypeptide"
EVQLLESGGGLVQPGGSLRLSCAASGFTFSSYAMSWVRQAPGKGLEWVSAISGSGGSTYYADSVKGRFTISRDNSKNTLYLQMNSLRAEDTAVYYCARREWWYDDWYLDYWGQGTLVTVSSGGGGSGGGGSGGGGSGGGGSDIQMTQSPSSLSASVGDRVTITCRASQSISSYLNWYQQKPGKAPKLLIYAASSLQSGVPSRFSGSGSGTDFTLTISSLQPEDFATYYCQQSYSTPLTFGQGTKVEIKTTTPAPRPPTPAPTIASQPLSLRPEACRPAAGGAVHTRGLDFACDIYIWAPLAGTCGVLLLSLVITLYCKRGRKKLLYIFKQPFMRPVQTTQEEDGCSCRFPEEEEGGCELRVKFSRSADAPAYQQGQNQLYNELNLGRREEYDVLDKRRGRDPEMGGKPRRKNPQEGLYNELQKDKMAEAYSEIGMKGERRRGKGHDGLYQGLSTATKDTYDALHMQALPPR

SEQ ID NO: 75 - DNA, 1413 bp, Artificial Sequence
  source: /note="Description of Artificial Sequence: Synthetic polynucleotide"
gaagtgcagttgctggagtcaggcggaggactggtgcagcccggaggatcgcttcgcttgagctgcgcagcctcaggctttaccttctcctcctacgccatgtcctgggtcagacaggctcccgggaagggactggaatgggtgtccgccattagcggttccggcggaagcacttactatgccgactctgtgaagggccgcttcactatctcccgggacaactccaagaacaccctgtatctccaaatgaattccctgagggccgaagataccgcggtgtactactgcgctagacgggagtggtggtacgacgattggtacctggactactggggacagggcactctcgtgactgtgtcctccggtggtggtggatcggggggtggtggttcgggcggaggaggatctggaggaggagggtcggacattcaaatgactcagtccccgtcctccctctccgcctccgtgggagatcgcgtcacgatcacgtgcagggccagccagagcatctccagctacctgaactggtaccagcagaagccagggaaggcaccgaagctcctgatctacgccgctagctcgctgcagtccggcgtcccttcacggttctcgggatcgggctcaggcaccgacttcaccctgaccattagcagcctgcagccggaggacttcgcgacatactactgtcagcagtcatactccacccctctgaccttcggccaagggaccaaagtggagatcaagaccactaccccagcaccgaggccacccaccccggctcctaccatcgcctcccagcctctgtccctgcgtccggaggcatgtagacccgcagctggtggggccgtgcatacccggggtcttgacttcgcctgcgatatctacatttgggcccctctggctggtacttgcggggtcctgctgctttcactcgtgatcactctttactgtaagcgcggtcggaagaagctgctgtacatctttaagcaacccttcatgaggcctgtgcagactactcaagaggaggacggctgttcatgccggttcccagaggaggaggaaggcggctgcgaactgcgcgtgaaattcagccgcagcgcagatgctccagcctaccagcaggggcagaaccagctctacaacgaactcaatcttggtcggagagaggagtacgacgtgctggacaagcggagaggacgggacccagaaatgggcgggaagccgcgcagaaagaatccccaagagggcctgtacaacgagctccaaaaggataagatggcagaagcctatagcgagattggtatgaaaggggaacgcagaagaggcaaaggccacgacggactgtaccagggactcagcaccgccaccaaggacacctatgacgctcttcacatgcaggccctgccgcctcgg

SEQ ID NO: 76 - protein, 12 aa, Artificial Sequence
  source: /note="Description of Artificial Sequence: Synthetic peptide"
REWWGESWLFDY

SEQ ID NO: 77 - protein, 14 aa, Artificial Sequence
  source: /note="Description of Artificial Sequence: Synthetic peptide"
ARREWWGESWLFDY

SEQ ID NO: 78 - protein, 121 aa, Artificial Sequence
  source: /note="Description of Artificial Sequence: Synthetic polypeptide"
EVQLLESGGGLVQPGGSLRLSCAASGFTFSSYAMSWVRQAPGKGLEWVSAISGSGGSTYYADSVKGRFTISRDNSKNTLYLQMNSLRAEDTAVYYCARREWWGESWLFDYWGQGTLVTVSS

SEQ ID NO: 79 - DNA, 363 bp, Artificial Sequence
  source: /note="Description of Artificial Sequence: Synthetic polynucleotide"
gaagtgcagttgctggagtcaggcggaggactggtgcagcccggaggatcgcttcgcttgagctgcgcagcctcaggctttaccttctcctcctacgccatgtcctgggtcagacaggctcccgggaagggactggaatgggtgtccgccattagcggttccggcggaagcacttactatgccgactctgtgaagggccgcttcactatctcccgggacaactccaagaacaccctgtatctccaaatgaattccctgagggccgaagataccgcggtgtactactgcgctagacgggagtggtggggagaaagctggctgttcgactactggggacagggcactctcgtgactgtgtcctcc

SEQ ID NO: 80 - protein, 248 aa, Artificial Sequence
  source: /note="Description of Artificial Sequence: Synthetic polypeptide"
EVQLLESGGGLVQPGGSLRLSCAASGFTFSSYAMSWVRQAPGKGLEWVSAISGSGGSTYYADSVKGRFTISRDNSKNTLYLQMNSLRAEDTAVYYCARREWWGESWLFDYWGQGTLVTVSSGGGGSGGGGSGGGGSGGGGSDIQMTQSPSSLSASVGDRVTITCRASQSISSYLNWYQQKPGKAPKLLIYAASSLQSGVPSRFSGSGSGTDFTLTISSLQPEDFATYYCQQSYSTPLTFGQGTKVEIK

SEQ ID NO: 81 - DNA, 744 bp, Artificial Sequence
  source: /note="Description of Artificial Sequence: Synthetic polynucleotide"
gaagtgcagttgctggagtcaggcggaggactggtgcagcccggaggatcgcttcgcttgagctgcgcagcctcaggctttaccttctcctcctacgccatgtcctgggtcagacaggctcccgggaagggactggaatgggtgtccgccattagcggttccggcggaagcacttactatgccgactctgtgaagggccgcttcactatctcccgggacaactccaagaacaccctgtatctccaaatgaattccctgagggccgaagataccgcggtgtactactgcgctagacgggagtggtggggagaaagctggctgttcgactactggggacagggcactctcgtgactgtgtcctccggtggtggtggatcggggggtggtggttcgggcggaggaggatctggaggaggagggtcggacattcaaatgactcagtccccgtcctccctctccgcctccgtgggagatcgcgtcacgatcacgtgcagggccagccagagcatctccagctacctgaactggtaccagcagaagccagggaaggcaccgaagctcctgatctacgccgctagctcgctgcagtccggcgtcccttcacggttctcgggatcgggctcaggcaccgacttcaccctgaccattagcagcctgcagccggaggacttcgcgacatactactgtcagcagtcatactccacccctctgaccttcggccaagggaccaaagtggagatcaag

SEQ ID NO: 82 - protein, 471 aa, Artificial Sequence
  source: /note="Description of Artificial Sequence: Synthetic polypeptide"
EVQLLESGGGLVQPGGSLRLSCAASGFTFSSYAMSWVRQAPGKGLEWVSAISGSGGSTYYADSVKGRFTISRDNSKNTLYLQMNSLRAEDTAVYYCARREWWGESWLFDYWGQGTLVTVSSGGGGSGGGGSGGGGSGGGGSDIQMTQSPSSLSASVGDRVTITCRASQSISSYLNWYQQKPGKAPKLLIYAASSLQSGVPSRFSGSGSGTDFTLTISSLQPEDFATYYCQQSYSTPLTFGQGTKVEIKTTTPAPRPPTPAPTIASQPLSLRPEACRPAAGGAVHTRGLDFACDIYIWAPLAGTCGVLLLSLVITLYCKRGRKKLLYIFKQPFMRPVQTTQEEDGCSCRFPEEEEGGCELRVKFSRSADAPAYQQGQNQLYNELNLGRREEYDVLDKRRGRDPEMGGKPRRKNPQEGLYNELQKDKMAEAYSEIGMKGERRRGKGHDGLYQGLSTATKDTYDALHMQALPPR

SEQ ID NO: 83 - DNA, 1413 bp, Artificial Sequence
  source: /note="Description of Artificial Sequence: Synthetic polynucleotide"
gaagtgcagttgctggagtcaggcggaggactggtgcagcccggaggatcgcttcgcttgagctgcgcagcctcaggctttaccttctcctcctacgccatgtcctgggtcagacaggctcccgggaagggactggaatgggtgtccgccattagcggttccggcggaagcacttactatgccgactctgtgaagggccgcttcactatctcccgggacaactccaagaacaccctgtatctccaaatgaattccctgagggccgaagataccgcggtgtactactgcgctagacgggagtggtggggagaaagctggctgttcgactactggggacagggcactctcgtgactgtgtcctccggtggtggtggatcggggggtggtggttcgggcggaggaggatctggaggaggagggtcggacattcaaatgactcagtccccgtcctccctctccgcctccgtgggagatcgcgtcacgatcacgtgcagggccagccagagcatctccagctacctgaactggtaccagcagaagccagggaaggcaccgaagctcctgatctacgccgctagctcgctgcagtccggcgtcccttcacggttctcgggatcgggctcaggcaccgacttcaccctgaccattagcagcctgcagccggaggacttcgcgacatactactgtcagcagtcatactccacccctctgaccttcggccaagggaccaaagtggagatcaagaccactaccccagcaccgaggccacccaccccggctcctaccatcgcctcccagcctctgtccctgcgtccggaggcatgtagacccgcagctggtggggccgtgcatacccggggtcttgacttcgcctgcgatatctacatttgggcccctctggctggtacttgcggggtcctgctgctttcactcgtgatcactctttactgtaagcgcggtcggaagaagctgctgtacatctttaagcaacccttcatgaggcctgtgcagactactcaagaggaggacggctgttcatgccggttcccagaggaggaggaaggcggctgcgaactgcgcgtgaaattcagccgcagcgcagatgctccagcctaccagcaggggcagaaccagctctacaacgaactcaatcttggtcggagagaggagtacgacgtgctggacaagcggagaggacgggacccagaaatgggcgggaagccgcgcagaaagaatccccaagagggcctgtacaacgagctccaaaaggataagatggcagaagcctatagcgagattggtatgaaaggggaacgcagaagaggcaaaggccacgacggactgtaccagggactcagcaccgccaccaaggacacctatgacgctcttcacatgcaggccctgccgcctcgg

SEQ ID NO: 84 - protein, 14 aa, Artificial Sequence
  source: /note="Description of Artificial Sequence: Synthetic peptide"
  VARIANT (4)..(4): /replace=" "
  VARIANT (5)..(5): /replace=" "
  VARIANT (6)..(6): /replace="Tyr"
  VARIANT (7)..(7): /replace="Tyr" or "Asp"
  VARIANT (8)..(8): /replace="Asp" or "Val"
  VARIANT (9)..(9): /replace="Asp"
  VARIANT (11)..(11): /replace="Tyr"
  VARIANT (12)..(12): /replace="Leu"
  SITE (1)..(14): /note="Variant residues given in the sequence have no preference with respect to those in the annotations for variant positions"
REWVPWGESWLFDY

SEQ ID NO: 85 - protein, 16 aa, Artificial Sequence
  source: /note="Description of Artificial Sequence: Synthetic peptide"
  VARIANT (6)..(6): /replace=" "
  VARIANT (7)..(7): /replace=" "
  VARIANT (8)..(8): /replace="Tyr"
  VARIANT (9)..(9): /replace="Tyr" or "Asp"
  VARIANT (10)..(10): /replace="Asp" or "Val"
  VARIANT (11)..(11): /replace="Asp"
  VARIANT (13)..(13): /replace="Tyr"
  VARIANT (14)..(14): /replace="Leu"
  SITE (1)..(16): /note="Variant residues given in the sequence have no preference with respect to those in the annotations for variant positions"
ARREWVPWGESWLFDY

SEQ ID NO: 86 - protein, 5 aa, Artificial Sequence
  source: /note="Description of Artificial Sequence: Synthetic peptide"
SYGMH

SEQ ID NO: 87 - protein, 17 aa, Artificial Sequence
  source: /note="Description of Artificial Sequence: Synthetic peptide"
VISYDGSNKYYADSVKG

SEQ ID NO: 88 - protein, 14 aa, Artificial Sequence
  source: /note="Description of Artificial Sequence: Synthetic peptide"
SGYALHDDYYGLDV

SEQ ID NO: 89 - protein, 6 aa, Artificial Sequence
  source: /note="Description of Artificial Sequence: Synthetic peptide"
SYDGSN

SEQ ID NO: 90 - protein, 8 aa, Artificial Sequence
  source: /note="Description of Artificial Sequence: Synthetic peptide"
GFTFSSYG

SEQ ID NO: 91 - protein, 8 aa, Artificial Sequence
  source: /note="Description of Artificial Sequence: Synthetic peptide"
ISYDGSNK

SEQ ID NO: 92 - protein, 16 aa, Artificial Sequence
  source: /note="Description of Artificial Sequence: Synthetic peptide"
GGSGYALHDDYYGLDV

SEQ ID NO: 93 - protein, 123 aa, Artificial Sequence
  source: /note="Description of Artificial Sequence: Synthetic polypeptide"
QVQLQESGGGVVQPGRSLRLSCAASGFTFSSYGMHWVRQAPGKGLEWVAVISYDGSNKYYADSVKGRFTISRDNSKNTLYLQMNSLRAEDTAVYYCGGSGYALHDDYYGLDVWGQGTLVTVSS

SEQ ID NO: 94 - DNA, 369 bp, Artificial Sequence
  source: /note="Description of Artificial Sequence: Synthetic polynucleotide"
caagtgcagctgcaggaatccggtggcggagtcgtgcagcctggaaggagcctgagactctcatgcgccgcgtcagggttcaccttttcctcctacgggatgcattgggtcagacaggcccccggaaagggactcgaatgggtggctgtgatcagctacgacggctccaacaagtactacgccgactccgtgaaaggccggttcactatctcccgggacaactccaagaacacgctgtatctgcaaatgaattcactgcgcgcggaggataccgctgtgtactactgcggtggctccggttacgccctgcacgatgactattacggccttgacgtctggggccagggaaccctcgtgactgtgtccagc

SEQ ID NO: 95 - protein, 14 aa, Artificial Sequence
  source: /note="Description of Artificial Sequence: Synthetic peptide"
TGTSSDVGGYNYVS

SEQ ID NO: 96 - protein, 7 aa, Artificial Sequence
  source: /note="Description of Artificial Sequence: Synthetic peptide"
DVSNRPS

SEQ ID NO: 97 - protein, 11 aa, Artificial Sequence
  source: /note="Description of Artificial Sequence: Synthetic peptide"
SSYTSSSTLYV

SEQ ID NO: 98 - protein, 10 aa, Artificial Sequence
  source: /note="Description of Artificial Sequence: Synthetic peptide"
TSSDVGGYNY

SEQ ID NO: 99 - protein, 3 aa, Artificial Sequence
  source: /note="Description of Artificial Sequence: Synthetic peptide"
DVS

SEQ ID NO: 100 - protein, 8 aa, Artificial Sequence
  source: /note="Description of Artificial Sequence: Synthetic peptide"
YTSSSTLY

SEQ ID NO: 101 - protein, 9 aa, Artificial Sequence
  source: /note="Description of Artificial Sequence: Synthetic peptide"
SSDVGGYNY

SEQ ID NO: 102 - protein, 111 aa, Artificial Sequence
  source: /note="Description of Artificial Sequence: Synthetic polypeptide"
QSALTQPASVSGSPGQSITISCTGTSSDVGGYNYVSWYQQHPGKAPKLMIYDVSNRPSGVSNRFSGSKSGNTASLTISGLQAEDEADYYCSSYTSSSTLYVFGSGTKVTVL

SEQ ID NO: 103 - DNA, 333 bp, Artificial Sequence
  source: /note="Description of Artificial Sequence: Synthetic polynucleotide"
cagagcgcactgactcagccggcatccgtgtccggtagccccggacagtcgattaccatctcctgtaccggcacctcctccgacgtgggagggtacaactacgtgtcgtggtaccagcagcacccaggaaaggcccctaagttgatgatctacgatgtgtcaaaccgcccgtctggagtctccaaccggttctccggctccaagtccggcaacaccgccagcctgaccattagcgggctgcaagccgaggatgaggccgactactactgctcgagctacacatcctcgagcaccctctacgtgttcggctcggggactaaggtcaccgtgctg

SEQ ID NO: 104 - protein, 15 aa, Artificial Sequence
  source: /note="Description of Artificial Sequence: Synthetic peptide"
GGGGSGGGGSGGGGS

SEQ ID NO: 105 - protein, 249 aa, Artificial Sequence
  source: /note="Description of Artificial Sequence: Synthetic polypeptide"
QVQLQESGGGVVQPGRSLRLSCAASGFTFSSYGMHWVRQAPGKGLEWVAVISYDGSNKYYADSVKGRFTISRDNSKNTLYLQMNSLRAEDTAVYYCGGSGYALHDDYYGLDVWGQGTLVTVSSGGGGSGGGGSGGGGSQSALTQPASVSGSPGQSITISCTGTSSDVGGYNYVSWYQQHPGKAPKLMIYDVSNRPSGVSNRFSGSKSGNTASLTISGLQAEDEADYYCSSYTSSSTLYVFGSGTKVTVL

SEQ ID NO: 106 - DNA, 747 bp, Artificial Sequence
  source: /note="Description of Artificial Sequence: Synthetic polynucleotide"
caagtgcagctgcaggaatccggtggcggagtcgtgcagcctggaaggagcctgagactctcatgcgccgcgtcagggttcaccttttcctcctacgggatgcattgggtcagacaggcccccggaaagggactcgaatgggtggctgtgatcagctacgacggctccaacaagtactacgccgactccgtgaaaggccggttcactatctcccgggacaactccaagaacacgctgtatctgcaaatgaattcactgcgcgcggaggataccgctgtgtactactgcggtggctccggttacgccctgcacgatgactattacggccttgacgtctggggccagggaaccctcgtgactgtgtccagcggtggaggaggttcgggcggaggaggatcaggagggggtggatcgcagagcgcactgactcagccggcatccgtgtccggtagccccggacagtcgattaccatctcctgtaccggcacctcctccgacgtgggagggtacaactacgtgtcgtggtaccagcagcacccaggaaaggcccctaagttgatgatctacgatgtgtcaaaccgcccgtctggagtctccaaccggttctccggctccaagtccggcaacaccgccagcctgaccattagcgggctgcaagccgaggatgaggccgactactactgctcgagctacacatcctcgagcaccctctacgtgttcggctcggggactaaggtcaccgtgctg

SEQ ID NO: 107 - protein, 472 aa, Artificial Sequence
  source: /note="Description of Artificial Sequence: Synthetic polypeptide"
QVQLQESGGGVVQPGRSLRLSCAASGFTFSSYGMHWVRQAPGKGLEWVAVISYDGSNKYYADSVKGRFTISRDNSKNTLYLQMNSLRAEDTAVYYCGGSGYALHDDYYGLDVWGQGTLVTVSSGGGGSGGGGSGGGGSQSALTQPASVSGSPGQSITISCTGTSSDVGGYNYVSWYQQHPGKAPKLMIYDVSNRPSGVSNRFSGSKSGNTASLTISGLQAEDEADYYCSSYTSSSTLYVFGSGTKVTVLTTTPAPRPPTPAPTIASQPLSLRPEACRPAAGGAVHTRGLDFACDIYIWAPLAGTCGVLLLSLVITLYCKRGRKKLLYIFKQPFMRPVQTTQEEDGCSCRFPEEEEGGCELRVKFSRSADAPAYQQGQNQLYNELNLGRREEYDVLDKRRGRDPEMGGKPRRKNPQEGLYNELQKDKMAEAYSEIGMKGERRRGKGHDGLYQGLSTATKDTYDALHMQALPPR

SEQ ID NO: 108 - DNA, 1416 bp, Artificial Sequence
  source: /note="Description of Artificial Sequence: Synthetic polynucleotide"
caagtgcagctgcaggaatccggtggcggagtcgtgcagcctggaaggagcctgagactctcatgcgccgcgtcagggttcaccttttcctcctacgggatgcattgggtcagacaggcccccggaaagggactcgaatgggtggctgtgatcagctacgacggctccaacaagtactacgccgactccgtgaaaggccggttcactatctcccgggacaactccaagaacacgctgtatctgcaaatgaattcactgcgcgcggaggataccgctgtgtactactgcggtggctccggttacgccctgcacgatgactattacggccttgacgtctggggccagggaaccctcgtgactgtgtccagcggtggaggaggttcgggcggaggaggatcaggagggggtggatcgcagagcgcactgactcagccggcatccgtgtccggtagccccggacagtcgattaccatctcctgtaccggcacctcctccgacgtgggagggtacaactacgtgtcgtggtaccagcagcacccaggaaaggcccctaagttgatgatctacgatgtgtcaaaccgcccgtctggagtctccaaccggttctccggctccaagtccggcaacaccgccagcctgaccattagcgggctgcaagccgaggatgaggccgactactactgctcgagctacacatcctcgagcaccctctacgtgttcggctcggggactaaggtcaccgtgctgaccactaccccagcaccgaggccacccaccccggctcctaccatcgcctcccagcctctgtccctgcgtccggaggcatgtagacccgcagctggtggggccgtgcatacccggggtcttgacttcgcctgcgatatctacatttgggcccctctggctggtacttgcggggtcctgctgctttcactcgtgatcactctttactgtaagcgcggtcggaagaagctgctgtacatctttaagcaacccttcatgaggcctgtgcagactactcaagaggaggacggctgttcatgccggttcccagaggaggaggaaggcggctgcgaactgcgcgtgaaattcagccgcagcgcagatgctccagcctaccagcaggggcagaaccagctctacaacgaactcaatcttggtcggagagaggagtacgacgtgctggacaagcggagaggacgggacccagaaatgggcgggaagccgcgcagaaagaatccccaagagggcctgtacaacgagctccaaaaggataagatggcagaagcctatagcgagattggtatgaaaggggaacgcagaagaggcaaaggccacgacggactgtaccagggactcagcaccgccaccaaggacacctatgacgctcttcacatgcaggccctgccgcctcgg

SEQ ID NO: 109 - protein, 17 aa, Artificial Sequence
  source: /note="Description of Artificial Sequence: Synthetic peptide"
VISYKGSNKYYADSVKG

SEQ ID NO: 110 - protein, 6 aa, Artificial Sequence
  source: /note="Description of Artificial Sequence: Synthetic peptide"
SYKGSN

SEQ ID NO: 111 - protein, 8 aa, Artificial Sequence
  source: /note="Description of Artificial Sequence: Synthetic peptide"
ISYKGSNK

SEQ ID NO: 112 - protein, 123 aa, Artificial Sequence
  source: /note="Description of Artificial Sequence: Synthetic polypeptide"
QVQLVESGGGVVQPGRSLRLSCAASGFTFSSYGMHWVRQAPGKGLEWVAVISYKGSNKYYADSVKGRFTISRDNSKNTLYLQMNSLRAEDTAVYYCGGSGYALHDDYYGLDVWGQGTLVTVSS

SEQ ID NO: 113 - DNA, 369 bp, Artificial Sequence
  source: /note="Description of Artificial Sequence: Synthetic polynucleotide"
caagtgcagcttgtcgaatcgggaggcggagtggtgcagcctggacgatcgctccggctctcatgtgccgcgagcggattcaccttctcgagctacggcatgcactgggtcagacaagccccaggaaagggcctggaatgggtggctgtcatctcgtacaagggctcaaacaagtactacgccgactccgtgaagggccggttcaccatctcccgcgataactccaagaataccctctatctgcaaatgaacagcctgagggccgaggatactgcagtgtactactgcgggggttcaggctacgcgctgcacgacgactactacggattggacgtctggggccaaggaactcttgtgaccgtgtcctct

SEQ ID NO: 114 - protein, 7 aa, Artificial Sequence
  source: /note="Description of Artificial Sequence: Synthetic peptide"
EVSNRLR

SEQ ID NO: 115 - protein, 11 aa, Artificial Sequence
  source: /note="Description of Artificial Sequence: Synthetic peptide"
SSYTSSSALYV

SEQ ID NO: 116 - protein, 3 aa, Artificial Sequence
  source: /note="Description of Artificial Sequence: Synthetic peptide"
EVS

SEQ ID NO: 117 - protein, 8 aa, Artificial Sequence
  source: /note="Description of Artificial Sequence: Synthetic peptide"
YTSSSALY

SEQ ID NO: 118 - protein, 111 aa, Artificial Sequence
  source: /note="Description of Artificial Sequence: Synthetic polypeptide"
QSALTQPASVSGSPGQSITISCTGTSSDVGGYNYVSWYQQHPGKAPKLMIYEVSNRLRGVSNRFSGSKSGNTASLTISGLQAEDEADYYCSSYTSSSALYVFGSGTKVTVL

SEQ ID NO: 119 - DNA, 333 bp, Artificial Sequence
  source: /note="Description of Artificial Sequence: Synthetic polynucleotide"
cagagcgcgctgactcagcctgcctccgtgagcggttcgccgggacagtccattaccatttcgtgcaccgggacctcctccgacgtgggaggctacaactacgtgtcctggtaccagcagcatcccggaaaggccccgaagctgatgatctacgaagtgtcgaacagactgcggggagtctccaaccgcttttccgggtccaagtccggcaacaccgccagcctgaccatcagcgggctccaggcagaagatgaggctgactattactgctcctcctacacgtcaagctccgccctctacgtgttcgggtccgggaccaaagtcactgtgctg

SEQ ID NO: 120 - protein, 254 aa, Artificial Sequence
  source: /note="Description of Artificial Sequence: Synthetic polypeptide"
QVQLVESGGGVVQPGRSLRLSCAASGFTFSSYGMHWVRQAPGKGLEWVAVISYKGSNKYYADSVKGRFTISRDNSKNTLYLQMNSLRAEDTAVYYCGGSGYALHDDYYGLDVWGQGTLVTVSSGGGGSGGGGSGGGGSGGGGSQSALTQPASVSGSPGQSITISCTGTSSDVGGYNYVSWYQQHPGKAPKLMIYEVSNRLRGVSNRFSGSKSGNTASLTISGLQAEDEADYYCSSYTSSSALYVFGSGTKVTVL

SEQ ID NO: 121 - DNA, 762 bp, Artificial Sequence
  source: /note="Description of Artificial Sequence: Synthetic polynucleotide"
caagtgcagcttgtcgaatcgggaggcggagtggtgcagcctggacgatcgctccggctctcatgtgccgcgagcggattcaccttctcgagctacggcatgcactgggtcagacaagccccaggaaagggcctggaatgggtggctgtcatctcgtacaagggctcaaacaagtactacgccgactccgtgaagggccggttcaccatctcccgcgataactccaagaataccctctatctgcaaatgaacagcctgagggccgaggatactgcagtgtactactgcgggggttcaggctacgcgctgcacgacgactactacggattggacgtctggggccaaggaactcttgtgaccgtgtcctctggtggaggcggatcagggggtggcggatctgggggtggtggttccgggggaggaggatcgcagagcgcgctgactcagcctgcctccgtgagcggttcgccgggacagtccattaccatttcgtgcaccgggacctcctccgacgtgggaggctacaactacgtgtcctggtaccagcagcatcccggaaaggccccgaagctgatgatctacgaagtgtcgaacagactgcggggagtctccaaccgcttttccgggtccaagtccggcaacaccgccagcctgaccatcagcgggctccaggcagaagatgaggctgactattactgctcctcctacacgtcaagctccgccctctacgtgttcgggtccgggaccaaagtcactgtgctg

SEQ ID NO: 122 - protein, 477 aa, Artificial Sequence
  source: /note="Description of Artificial Sequence: Synthetic polypeptide"
QVQLVESGGGVVQPGRSLRLSCAASGFTFSSYGMHWVRQAPGKGLEWVAVISYKGSNKYYADSVKGRFTISRDNSKNTLYLQMNSLRAEDTAVYYCGGSGYALHDDYYGLDVWGQGTLVTVSSGGGGSGGGGSGGGGSGGGGSQSALTQPASVSGSPGQSITISCTGTSSDVGGYNYVSWYQQHPGKAPKLMIYEVSNRLRGVSNRFSGSKSGNTASLTISGLQAEDEADYYCSSYTSSSALYVFGSGTKVTVLTTTPAPRPPTPAPTIASQPLSLRPEACRPAAGGAVHTRGLDFACDIYIWAPLAGTCGVLLLSLVITLYCKRGRKKLLYIFKQPFMRPVQTTQEEDGCSCRFPEEEEGGCELRVKFSRSADAPAYQQGQNQLYNELNLGRREEYDVLDKRRGRDPEMGGKPRRKNPQEGLYNELQKDKMAEAYSEIGMKGERRRGKGHDGLYQGLSTATKDTYDALHMQALPPR

SEQ ID NO: 123 - DNA, 1431 bp, Artificial Sequence
  source: /note="Description of Artificial Sequence: Synthetic polynucleotide"
caagtgcagcttgtcgaatcgggaggcggagtggtgcagcctggacgatcgctccggctctcatgtgccgcgagcggattcaccttctcgagctacggcatgcactgggtcagacaagccccaggaaagggcctggaatgggtggctgtcatctcgtacaagggctcaaacaagtactacgccgactccgtgaagggccggttcaccatctcccgcgataactccaagaataccctctatctgcaaatgaacagcctgagggccgaggatactgcagtgtactactgcgggggttcaggctacgcgctgcacgacgactactacggattggacgtctggggccaaggaactcttgtgaccgtgtcctctggtggaggcggatcagggggtggcggatctgggggtggtggttccgggggaggaggatcgcagagcgcgctgactcagcctgcctccgtgagcggttcgccgggacagtccattaccatttcgtgcaccgggacctcctccgacgtgggaggctacaactacgtgtcctggtaccagcagcatcccggaaaggccccgaagctgatgatctacgaagtgtcgaacagactgcggggagtctccaaccgcttttccgggtccaagtccggcaacaccgccagcctgaccatcagcgggctccaggcagaagatgaggctgactattactgctcctcctacacgtcaagctccgccctctacgtgttcgggtccgggaccaaagtcactgtgctgaccactaccccagcaccgaggccacccaccccggctcctaccatcgcctcccagcctctgtccctgcgtccggaggcatgtagacccgcagctggtggggccgtgcatacccggggtcttgacttcgcctgcgatatctacatttgggcccctctggctggtacttgcggggtcctgctgctttcactcgtgatcactctttactgtaagcgcggtcggaagaagctgctgtacatctttaagcaacccttcatgaggcctgtgcagactactcaagaggaggacggctgttcatgccggttcccagaggaggaggaaggcggctgcgaactgcgcgtgaaattcagccgcagcgcagatgctccagcctaccagcaggggcagaaccagctctacaacgaactcaatcttggtcggagagaggagtacgacgtgctggacaagcggagaggacgggacccagaaatgggcgggaagccgcgcagaaagaatccccaagagggcctgtacaacgagctccaaaaggataagatggcagaagcctatagcgagattggtatgaaaggggaacgcagaagaggcaaaggccacgacggactgtaccagggactcagcaccgccaccaaggacacctatgacgctcttcacatgcaggccctgccgcctcgg

SEQ ID NO: 124 - protein, 111 aa, Artificial Sequence
  source: /note="Description of Artificial Sequence: Synthetic polypeptide"
QSALTQPASVSGSPGQSITISCTGTSSDVGGYNYVSWYQQHPGKAPKLMIYEVSNRLRGVSNRFSGSKSGNTASLTISGLQAEDEADYYCSSYTSSSTLYVFGSGTKVTVL

SEQ ID NO: 125 - DNA, 333 bp, Artificial Sequence
  source: /note="Description of Artificial Sequence: Synthetic polynucleotide"
cagagcgcgctgactcagcctgcctccgtgagcggttcgccgggacagtccattaccatttcgtgcaccgggacctcctccgacgtgggaggctacaactacgtgtcctggtaccagcagcatcccggaaaggccccgaagctgatgatctacgaagtgtcgaacagactgcggggagtctccaaccgcttttccgggtccaagtccggcaacaccgccagcctgaccatcagcgggctccaggcagaagatgaggctgactattactgctcctcctacacgtcaagctccaccctctacgtgttcgggtccgggaccaaagtcactgtgctg

SEQ ID NO: 126 - protein, 254 aa, Artificial Sequence
  source: /note="Description of Artificial Sequence: Synthetic polypeptide"
QVQLVESGGGVVQPGRSLRLSCAASGFTFSSYGMHWVRQAPGKGLEWVAVISYKGSNKYYADSVKGRFTISRDNSKNTLYLQMNSLRAEDTAVYYCGGSGYALHDDYYGLDVWGQGTLVTVSSGGGGSGGGGSGGGGSGGGGSQSALTQPASVSGSPGQSITISCTGTSSDVGGYNYVSWYQQHPGKAPKLMIYEVSNRLRGVSNRFSGSKSGNTASLTISGLQAEDEADYYCSSYTSSSTLYVFGSGTKVTVL

SEQ ID NO: 127 - DNA, 762 bp, Artificial Sequence
  source: /note="Description of Artificial Sequence: Synthetic polynucleotide"
caagtgcagcttgtcgaatcgggaggcggagtggtgcagcctggacgatcgctccggctctcatgtgccgcgagcggattcaccttctcgagctacggcatgcactgggtcagacaagccccaggaaagggcctggaatgggtggctgtcatctcgtacaagggctcaaacaagtactacgccgactccgtgaagggccggttcaccatctcccgcgataactccaagaataccctctatctgcaaatgaacagcctgagggccgaggatactgcagtgtactactgcgggggttcaggctacgcgctgcacgacgactactacggattggacgtctggggccaaggaactcttgtgaccgtgtcctctggtggaggcggatcagggggtggcggatctgggggtggtggttccgggggaggaggatcgcagagcgcgctgactcagcctgcctccgtgagcggttcgccgggacagtccattaccatttcgtgcaccgggacctcctccgacgtgggaggctacaactacgtgtcctggtaccagcagcatcccggaaaggccccgaagctgatgatctacgaagtgtcgaacagactgcggggagtctccaaccgcttttccgggtccaagtccggcaacaccgccagcctgaccatcagcgggctccaggcagaagatgaggctgactattactgctcctcctacacgtcaagctccaccctctacgtgttcgggtccgggaccaaagtcactgtgctg

SEQ ID NO: 128 - protein, 477 aa, Artificial Sequence
  source: /note="Description of Artificial Sequence: Synthetic polypeptide"
QVQLVESGGGVVQPGRSLRLSCAASGFTFSSYGMHWVRQAPGKGLEWVAVISYKGSNKYYADSVKGRFTISRDNSKNTLYLQMNSLRAEDTAVYYCGGSGYALHDDYYGLDVWGQGTLVTVSSGGGGSGGGGSGGGGSGGGGSQSALTQPASVSGSPGQSITISCTGTSSDVGGYNYVSWYQQHPGKAPKLMIYEVSNRLRGVSNRFSGSKSGNTASLTISGLQAEDEADYYCSSYTSSSTLYVFGSGTKVTVLTTTPAPRPPTPAPTIASQPLSLRPEACRPAAGGAVHTRGLDFACDIYIWAPLAGTCGVLLLSLVITLYCKRGRKKLLYIFKQPFMRPVQTTQEEDGCSCRFPEEEEGGCELRVKFSRSADAPAYQQGQNQLYNELNLGRREEYDVLDKRRGRDPEMGGKPRRKNPQEGLYNELQKDKMAEAYSEIGMKGERRRGKGHDGLYQGLSTATKDTYDALHMQALPPR

SEQ ID NO: 129 - DNA, 1431 bp, Artificial Sequence
  source: /note="Description of Artificial Sequence: Synthetic polynucleotide"
caagtgcagcttgtcgaatcgggaggcggagtggtgcagcctggacgatcgctccggctctcatgtgccgcgagcggattcaccttctcgagctacggcatgcactgggtcagacaagccccaggaaagggcctggaatgggtggctgtcatctcgtacaagggctcaaacaagtactacgccgactccgtgaagggccggttcaccatctcccgcgataactccaagaataccctctatctgcaaatgaacagcctgagggccgaggatactgcagtgtactactgcgggggttcaggctacgcgctgcacgacgactactacggattggacgtctggggccaaggaactcttgtgaccgtgtcctctggtggaggcggatcagggggtggcggatctgggggtggtggttccgggggaggaggatcgcagagcgcgctgactcagcctgcctccgtgagcggttcgccgggacagtccattaccatttcgtgcaccgggacctcctccgacgtgggaggctacaactacgtgtcctggtaccagcagcatcccggaaaggccccgaagctgatgatctacgaagtgtcgaacagactgcggggagtctccaaccgcttttccgggtccaagtccggcaacaccgccagcctgaccatcagcgggctccaggcagaagatgaggctgactattactgctcctcctacacgtcaagctccaccctctacgtgttcgggtccgggaccaaagtcactgtgctgaccactaccccagcaccgaggccacccaccccggctcctaccatcgcctcccagcctctgtccctgcgtccggaggcatgtagacccgcagctggtggggccgtgcatacccggggtcttgacttcgcctgcgatatctacatttgggcccctctggctggtacttgcggggtcctgctgctttcactcgtgatcactctttactgtaagcgcggtcggaagaagctgctgtacatctttaagcaacccttcatgaggcctgtgcagactactcaagaggaggacggctgttcatgccggttcccagaggaggaggaaggcggctgcgaactgcgcgtgaaattcagccgcagcgcagatgctccagcctaccagcaggggcagaaccagctctacaacgaactcaatcttggtcggagagaggagtacgacgtgctggacaagcggagaggacgggacccagaaatgggcgggaagccgcgcagaaagaatccccaagagggcctgtacaacgagctccaaaaggataagatggcagaagcctatagcgagattggtatgaaaggggaacgcagaagaggcaaaggccacgacggactgtaccagggactcagcaccgccaccaaggacacctatgacgctcttcacatgcaggccctgccgcctcgg

SEQ ID NO: 130 - protein, 17 aa, Artificial Sequence
  source: /note="Description of Artificial Sequence: Synthetic peptide"
  VARIANT (5)..(5): /replace="Lys"
  SITE (1)..(17): /note="Variant residues given in the sequence have no preference with respect to those in the annotations for variant positions"
VISYDGSNKYYADSVKG

SEQ ID NO: 131 - protein, 7 aa, Artificial Sequence
  source: /note="Description of Artificial Sequence: Synthetic peptide"
  VARIANT (1)..(1): /replace="Glu"
  VARIANT (6)..(6): /replace="Leu"
  VARIANT (7)..(7): /replace="Arg"
  SITE (1)..(7): /note="Variant residues given in the sequence have no preference with respect to those in the annotations for variant positions"
DVSNRPS

SEQ ID NO: 132 - protein, 11 aa, Artificial Sequence
  source: /note="Description of Artificial Sequence: Synthetic peptide"
  VARIANT (8)..(8): /replace="Ala"
  SITE (1)..(11): /note="Variant residues given in the sequence have no preference with respect to those in the annotations for variant positions"
SSYTSSSTLYV

SEQ ID NO: 133 - protein, 6 aa, Artificial Sequence
  source: /note="Description of Artificial Sequence: Synthetic peptide"
  VARIANT (3)..(3): /replace="Lys"
  SITE (1)..(6): /note="Variant residues given in the sequence have no preference with respect to those in the annotations for variant positions"
SYDGSN

SEQ ID NO: 134 - protein, 3 aa, Artificial Sequence
  source: /note="Description of Artificial Sequence: Synthetic peptide"
  VARIANT (1)..(1): /replace="Glu"
  SITE (1)..(3): /note="Variant residues given in the sequence have no preference with respect to those in the annotations for variant positions"
DVS

SEQ ID NO: 135 - protein, 8 aa, Artificial Sequence
  source: /note="Description of Artificial Sequence: Synthetic peptide"
  VARIANT (6)..(6): /replace="Ala"
  SITE (1)..(8): /note="Variant residues given in the sequence have no preference with respect to those in the annotations for variant positions"
YTSSSTLY

SEQ ID NO: 136 - protein, 8 aa, Artificial Sequence
  source: /note="Description of Artificial Sequence: Synthetic peptide"
  VARIANT (4)..(4): /replace="Lys"
  SITE (1)..(8): /note="Variant residues given in the sequence have no preference with respect to those in the annotations for variant positions"
ISYDGSNK

SEQ ID NO: 137 - protein, 5 aa, Artificial Sequence
  source: /note="Description of Artificial Sequence: Synthetic peptide"
GFWMS

SEQ ID NO: 138 - protein, 17 aa, Artificial Sequence
  source: /note="Description of Artificial Sequence: Synthetic peptide"
NIKQDGSEKYYVDSVRG

SEQ ID NO: 139 - protein, 9 aa, Artificial Sequence
  source: /note="Description of Artificial Sequence: Synthetic peptide"
ALDYYGMDV

SEQ ID NO: 140 - protein, 7 aa, Artificial Sequence
  source: /note="Description of Artificial Sequence: Synthetic peptide"
GFTFSGF

SEQ ID NO: 141 - protein, 6 aa, Artificial Sequence
  source: /note="Description of Artificial Sequence: Synthetic peptide"
KQDGSE

SEQ ID NO: 142 - protein, 8 aa, Artificial Sequence
  source: /note="Description of Artificial Sequence: Synthetic peptide"
GFTFSGFW

SEQ ID NO: 143 - protein, 8 aa, Artificial Sequence
  source: /note="Description of Artificial Sequence: Synthetic peptide"
IKQDGSEK

SEQ ID NO: 144 - protein, 11 aa, Artificial Sequence
  source: /note="Description of Artificial Sequence: Synthetic peptide"
ARALDYYGMDV

SEQ ID NO: 145 - protein, 118 aa, Artificial Sequence
  source: /note="Description of Artificial Sequence: Synthetic polypeptide"
EVQLVESGGGLVQPGGSLRLSCAASGFTFSGFWMSWVRQAPGKGLEWVANIKQDGSEKYYVDSVRGRFTISRDNAKNSLYLQMNSLRAEDTAVYYCARALDYYGMDVWGQGTTVTVSS

SEQ ID NO: 146 - DNA, 354 bp, Artificial Sequence
  source: /note="Description of Artificial Sequence: Synthetic polynucleotide"
gaagtgcaactggtggagagcggtggagggcttgtccagcccggaggatcgctgcggctgtcctgtgctgcgtccgggttcaccttctccggcttctggatgtcctgggtcagacaggcaccgggaaagggcctcgaatgggtggccaacatcaagcaggatggctccgagaagtactacgtcgactccgtgagaggccgcttcaccatctcccgggacaacgccaagaactcgctgtacctccaaatgaatagcctcagggcggaagatactgctgtgtattactgcgcacgcgcccttgactactacggcatggacgtctggggccaagggaccactgtgaccgtgtctagc

SEQ ID NO: 147 - protein, 17 aa, Artificial Sequence
  source: /note="Description of Artificial Sequence: Synthetic peptide"
RSSQSLLDSDDGNTYLD

SEQ ID NO: 148 - protein, 7 aa, Artificial Sequence
  source: /note="Description of Artificial Sequence: Synthetic peptide"
TLSYRAS

SEQ ID NO: 149 - protein, 10 aa, Artificial Sequence
  source: /note="Description of Artificial Sequence: Synthetic peptide"
TQRLEFPSIT

SEQ ID NO: 150 - protein, 13 aa, Artificial Sequence
  source: /note="Description of Artificial Sequence: Synthetic peptide"
SQSLLDSDDGNTY

SEQ ID NO: 151 - protein, 3 aa, Artificial Sequence
  source: /note="Description of Artificial Sequence: Synthetic peptide"
TLS

SEQ ID NO: 152 - protein, 7 aa, Artificial Sequence
  source: /note="Description of Artificial Sequence: Synthetic peptide"
RLEFPSI

SEQ ID NO: 153 - protein, 12 aa, Artificial Sequence
  source: /note="Description of Artificial Sequence: Synthetic peptide"
QSLLDSDDGNTY

SEQ ID NO: 154 - protein, 114 aa, Artificial Sequence
  source: /note="Description of Artificial Sequence: Synthetic polypeptide"
DIVMTQTPLSLPVTPGEPASISCRSSQSLLDSDDGNTYLDWYLQKPGQSPRLLIYTLSYRASGVPDRFSGSGSGTDFTLKISRVEAEDVGLYYCTQRLEFPSITFGQGTRLEIK

SEQ ID NO: 155 - DNA, 342 bp, Artificial Sequence
  source: /note="Description of Artificial Sequence: Synthetic polynucleotide"
gatatcgtgatgacccagactcccctgtccctgcctgtgactcccggagaaccagcctccatttcctgccggtcctcccagtccctgctggacagcgacgacggcaacacttacctggactggtacttgcagaagccgggccaatcgcctcgcctgctgatctataccctgtcataccgggcctcaggagtgcctgaccgcttctcgggatcagggagcgggaccgatttcaccctgaaaatttcccgagtggaagccgaggacgtcggactgtactactgcacccagcgcctcgaattcccgtcgattacgtttggacagggtacccggcttgagatcaag

SEQ ID NO: 156 - protein, 252 aa, Artificial Sequence
  source: /note="Description of Artificial Sequence: Synthetic polypeptide"
EVQLVESGGGLVQPGGSLRLSCAASGFTFSGFWMSWVRQAPGKGLEWVANIKQDGSEKYYVDSVRGRFTISRDNAKNSLYLQMNSLRAEDTAVYYCARALDYYGMDVWGQGTTVTVSSGGGGSGGGGSGGGGSGGGGSDIVMTQTPLSLPVTPGEPASISCRSSQSLLDSDDGNTYLDWYLQKPGQSPRLLIYTLSYRASGVPDRFSGSGSGTDFTLKISRVEAEDVGLYYCTQRLEFPSITFGQGTRLEIK

SEQ ID NO: 157 - DNA, 756 bp, Artificial Sequence
  source: /note="Description of Artificial Sequence: Synthetic polynucleotide"
gaagtgcaactggtggagagcggtggagggcttgtccagcccggaggatcgctgcggctgtcctgtgctgcgtccgggttcaccttctccggcttctggatgtcctgggtcagacaggcaccgggaaagggcctcgaatgggtggccaacatcaagcaggatggctccgagaagtactacgtcgactccgtgagaggccgcttcaccatctcccgggacaacgccaagaactcgctgtacctccaaatgaatagcctcagggcggaagatactgctgtgtattactgcgcacgcgcccttgactactacggcatggacgtctggggccaagggaccactgtgaccgtgtctagcggaggcggaggttcagggggcggtggatcaggcggaggaggatcggggggtggtggatcggatatcgtgatgacccagactcccctgtccctgcctgtgactcccggagaaccagcctccatttcctgccggtcctcccagtccctgctggacagcgacgacggcaacacttacctggactggtacttgcagaagccgggccaatcgcctcgcctgctgatctataccctgtcataccgggcctcaggagtgcctgaccgcttctcgggatcagggagcgggaccgatttcaccctgaaaatttcccgagtggaagccgaggacgtcggactgtactactgcacccagcgcctcgaattcccgtcgattacgtttggacagggtacccggcttgagatcaag

SEQ ID NO: 158 - protein, 475 aa, Artificial Sequence
  source: /note="Description of Artificial Sequence: Synthetic polypeptide"
EVQLVESGGGLVQPGGSLRLSCAASGFTFSGFWMSWVRQAPGKGLEWVANIKQDGSEKYYVDSVRGRFTISRDNAKNSLYLQMNSLRAEDTAVYYCARALDYYGMDVWGQGTTVTVSSGGGGSGGGGSGGGGSGGGGSDIVMTQTPLSLPVTPGEPASISCRSSQSLLDSDDGNTYLDWYLQKPGQSPRLLIYTLSYRASGVPDRFSGSGSGTDFTLKISRVEAEDVGLYYCTQRLEFPSITFGQGTRLEIKTTTPAPRPPTPAPTIASQPLSLRPEACRPAAGGAVHTRGLDFACDIYIWAPLAGTCGVLLLSLVITLYCKRGRKKLLYIFKQPFMRPVQTTQEEDGCSCRFPEEEEGGCELRVKFSRSADAPAYQQGQNQLYNELNLGRREEYDVLDKRRGRDPEMGGKPRRKNPQEGLYNELQKDKMAEAYSEIGMKGERRRGKGHDGLYQGLSTATKDTYDALHMQALPPR

SEQ ID NO: 159 - DNA, 1425 bp, Artificial Sequence
  source: /note="Description of Artificial Sequence: Synthetic polynucleotide"
gaagtgcaactggtggagagcggtggagggcttgtccagcccggaggatcgctgcggctgtcctgtgctgcgtccgggttcaccttctccggcttctggatgtcctgggtcagacaggcaccgggaaagggcctcgaatgggtggccaacatcaagcaggatggctccgagaagtactacgtcgactccgtgagaggccgcttcaccatctcccgggacaacgccaagaactcgctgtacctccaaatgaatagcctcagggcggaagatactgctgtgtattactgcgcacgcgcccttgactactacggcatggacgtctggggccaagggaccactgtgaccgtgtctagcggaggcggaggttcagggggcggtggatcaggcggaggaggatcggggggtggtggatcggatatcgtgatgacccagactcccctgtccctgcctgtgactcccggagaaccagcctccatttcctgccggtcctcccagtccctgctggacagcgacgacggcaacacttacctggactggtacttgcagaagccgggccaatcgcctcgcctgctgatctataccctgtcataccgggcctcaggagtgcctgaccgcttctcgggatcagggagcgggaccgatttcaccctgaaaatttcccgagtggaagccgaggacgtcggactgtactactgcacccagcgcctcgaattcccgtcgattacgtttggacagggtacccggcttgagatcaagaccactaccccagcaccgaggccacccaccccggctcctaccatcgcctcccagcctctgtccctgcgtccggaggcatgtagacccgcagctggtggggccgtgcatacccggggtcttgacttcgcctgcgatatctacatttgggcccctctggctggtacttgcggggtcctgctgctttcactcgtgatcactctttactgtaagcgcggtcggaagaagctgctgtacatctttaagcaacccttcatgaggcctgtgcagactactcaagaggaggacggctgttcatgccggttcccagaggaggaggaaggcggctgcgaactgcgcgtgaaattcagccgcagcgcagatgctccagcctaccagcaggggcagaaccagctctacaacgaactcaatcttggtcggagagaggagtacgacgtgctggacaagcggagaggacgggacccagaaatgggcgggaagccgcgcagaaagaatccccaagagggcctgtacaacgagctccaaaaggataagatggcagaagcctatagcgagattggtatgaaaggggaacgcagaagaggcaaaggccacgacggactgtaccagggactcagcaccgccaccaaggacacctatgacgctcttcacatgcaggccctgccgcctcgg

SEQ ID NO: 160 - protein, 5 aa, Artificial Sequence
  source: /note="Description of Artificial Sequence: Synthetic peptide"
SFRMN

SEQ ID NO: 161 - protein, 17 aa, Artificial Sequence
  source: /note="Description of Artificial Sequence: Synthetic peptide"
SISSSSSYIYYADSVKG

SEQ ID NO: 162 - protein, 9 aa, Artificial Sequence
  source: /note="Description of Artificial Sequence: Synthetic peptide"
WLSYYGMDV

SEQ ID NO: 163 - protein, 7 aa, Artificial Sequence
  source: /note="Description of Artificial Sequence: Synthetic peptide"
GFTFSSF

SEQ ID NO: 164 - protein, 6 aa, Artificial Sequence
  source: /note="Description of Artificial Sequence: Synthetic peptide"
SSSSSY

SEQ ID NO: 165 - protein, 8 aa, Artificial Sequence
  source: /note="Description of Artificial Sequence: Synthetic peptide"
GFTFSSFR

SEQ ID NO: 166 - protein, 8 aa, Artificial Sequence
  source: /note="Description of Artificial Sequence: Synthetic peptide"
ISSSSSYI

SEQ ID NO: 167 - protein, 11 aa, Artificial Sequence
  source: /note="Description of Artificial Sequence: Synthetic peptide"
ARWLSYYGMDV

SEQ ID NO: 168 - protein, 118 aa, Artificial Sequence
  source: /note="Description of Artificial Sequence: Synthetic polypeptide"
EVQLVESGGGLVKPGGSLRLSCAASGFTFSSFRMNWVRQAPGKGLEWVSSISSSSSYIYYADSVKGRFTISRDNAKNSLYLQMNSLRAEDTAVYYCARWLSYYGMDVWGQGTTVTVSS

SEQ ID NO: 169 - DNA, 354 bp, Artificial Sequence
  source: /note="Description of Artificial Sequence: Synthetic polynucleotide"
gaagtgcaactggtggagagcggtggagggcttgtcaagcccggaggatcgctgcggctgtcctgtgctgcgtccgggttcaccttctcctcgttccgcatgaactgggtcagacaggcaccgggaaagggcctcgaatgggtgtcctcaatctcatcgtcctcgtcctacatctactacgccgactccgtgaaaggccgcttcaccatctcccgggacaacgccaagaactcgctgtacctccaaatgaatagcctcagggcggaagatactgctgtgtattactgcgcacgctggctttcctactacggcatggacgtctggggccaagggaccactgtgaccgtgtctagc

SEQ ID NO: 170 - protein, 7 aa, Artificial Sequence
  source: /note="Description of Artificial Sequence: Synthetic peptide"
TLSFRAS

SEQ ID NO: 171 - protein, 9 aa, Artificial Sequence
  source: /note="Description of Artificial Sequence: Synthetic peptide"
MQRIGFPIT

SEQ ID NO: 172 - protein, 6 aa, Artificial Sequence
  source: /note="Description of Artificial Sequence: Synthetic peptide"
RIGFPI

SEQ ID NO: 173 - protein, 113 aa, Artificial Sequence
  source: /note="Description of Artificial Sequence: Synthetic polypeptide"
DIVMTQTPLSLPVTPGEPASISCRSSQSLLDSDDGNTYLDWYLQKPGQSPQLLIYTLSFRASGVPDRFSGSGSGTDFTLKIRRVEAEDVGVYYCMQRIGFPITFGQGTRLEIK

SEQ ID NO: 174 - DNA, 339 bp, Artificial Sequence
  source: /note="Description of Artificial Sequence: Synthetic polynucleotide"
gatatcgtgatgacccagactcccctgtccctgcctgtgactcccggagaaccagcctccatttcctgccggtcctcccagtccctgctggacagcgacgacggcaacacttacctggactggtacttgcagaagccgggccaatcgcctcagctgctgatctataccctgtcattccgggcctcaggagtgcctgaccgcttctcgggatcagggagcgggaccgatttcaccctgaaaattaggcgagtggaagccgaggacgtcggagtgtactactgcatgcagcgcatcggcttcccgattacgtttggacagggtacccggcttgagatcaag

SEQ ID NO: 175 - protein, 251 aa, Artificial Sequence
  source: /note="Description of Artificial Sequence: Synthetic polypeptide"
EVQLVESGGGLVKPGGSLRLSCAASGFTFSSFRMNWVRQAPGKGLEWVSSISSSSSYIYYADSVKGRFTISRDNAKNSLYLQMNSLRAEDTAVYYCARWLSYYGMDVWGQGTTVTVSSGGGGSGGGGSGGGGSGGGGSDIVMTQTPLSLPVTPGEPASISCRSSQSLLDSDDGNTYLDWYLQKPGQSPQLLIYTLSFRASGVPDRFSGSGSGTDFTLKIRRVEAEDVGVYYCMQRIGFPITFGQGTRLEIK

SEQ ID NO: 176 - DNA, 753 bp, Artificial Sequence
  source: /note="Description of Artificial Sequence: Synthetic polynucleotide"
gaagtgcaactggtggagagcggtggagggcttgtcaagcccggaggatcgctgcggctgtcctgtgctgcgtccgggttcaccttctcctcgttccgcatgaactgggtcagacaggcaccgggaaagggcctcgaatgggtgtcctcaatctcatcgtcctcgtcctacatctactacgccgactccgtgaaaggccgcttcaccatctcccgggacaacgccaagaactcgctgtacctccaaatgaatagcctcagggcggaagatactgctgtgtattactgcgcacgctggctttcctactacggcatggacgtctggggccaagggaccactgtgaccgtgtctagcggaggcggaggttcagggggcggtggatcaggcggaggaggatcggggggtggtggatcggatatcgtgatgacccagactcccctgtccctgcctgtgactcccggagaaccagcctccatttcctgccggtcctcccagtccctgctggacagcgacgacggcaacacttacctggactggtacttgcagaagccgggccaatcgcctcagctgctgatctataccctgtcattccgggcctcaggagtgcctgaccgcttctcgggatcagggagcgggaccgatttcaccctgaaaattaggcgagtggaagccgaggacgtcggagtgtactactgcatgcagcgcatcggcttcccgattacgtttggacagggtacccggcttgagatcaag

SEQ ID NO: 177 - protein, 474 aa, Artificial Sequence
  source: /note="Description of Artificial Sequence: Synthetic polypeptide"
EVQLVESGGGLVKPGGSLRLSCAASGFTFSSFRMNWVRQAPGKGLEWVSSISSSSSYIYYADSVKGRFTISRDNAKNSLYLQMNSLRAEDTAVYYCARWLSYYGMDVWGQGTTVTVSSGGGGSGGGGSGGGGSGGGGSDIVMTQTPLSLPVTPGEPASISCRSSQSLLDSDDGNTYLDWYLQKPGQSPQLLIYTLSFRASGVPDRFSGSGSGTDFTLKIRRVEAEDVGVYYCMQRIGFPITFGQGTRLEIKTTTPAPRPPTPAPTIASQPLSLRPEACRPAAGGAVHTRGLDFACDIYIWAPLAGTCGVLLLSLVITLYCKRGRKKLLYIFKQPFMRPVQTTQEEDGCSCRFPEEEEGGCELRVKFSRSADAPAYQQGQNQLYNELNLGRREEYDVLDKRRGRDPEMGGKPRRKNPQEGLYNELQKDKMAEAYSEIGMKGERRRGKGHDGLYQGLSTATKDTYDALHMQALPPR

SEQ ID NO: 178 - DNA, 1422 bp, Artificial Sequence
  source: /note="Description of Artificial Sequence: Synthetic polynucleotide"
gaagtgcaactggtggagagcggtggagggcttgtcaagcccggaggatcgctgcggctgtcctgtgctgcgtccgggttcaccttctcctcgttccgcatgaactgggtcagacaggcaccgggaaagggcctcgaatgggtgtcctcaatctcatcgtcctcgtcctacatctactacgccgactccgtgaaaggccgcttcaccatctcccgggacaacgccaagaactcgctgtacctccaaatgaatagcctcagggcggaagatactgctgtgtattactgcgcacgctggctttcctactacggcatggacgtctggggccaagggaccactgtgaccgtgtctagcggaggcggaggttcagggggcggtggatcaggcggaggaggatcggggggtggtggatcggatatcgtgatgacccagactcccctgtccctgcctgtgactcccggagaaccagcctccatttcctgccggtcctcccagtccctgctggacagcgacgacggcaacacttacctggactggtacttgcagaagccgggccaatcgcctcagctgctgatctataccctgtcattccgggcctcaggagtgcctgaccgcttctcgggatcagggagcgggaccgatttcaccctgaaaattaggcgagtggaagccgaggacgtcggagtgtactactgcatgcagcgcatcggcttcccgattacgtttggacagggtacccggcttgagatcaagaccactaccccagcaccgaggccacccaccccggctcctaccatcgcctcccagcctctgtccctgcgtccggaggcatgtagacccgcagctggtggggccgtgcatacccggggtcttgacttcgcctgcgatatctacatttgggcccctctggctggtacttgcggggtcctgctgctttcactcgtgatcactctttactgtaagcgcggtcggaagaagctgctgtacatctttaagcaacccttcatgaggcctgtgcagactactcaagaggaggacggctgttcatgccggttcccagaggaggaggaaggcggctgcgaactgcgcgtgaaattcagccgcagcgcagatgctccagcctaccagcaggggcagaaccagctctacaacgaactcaatcttggtcggagagaggagtacgacgtgctggacaagcggagaggacgggacccagaaatgggcgggaagccgcgcagaaagaatccccaagagggcctgtacaacgagctccaaaaggataagatggcagaagcctatagcgagattggtatgaaaggggaacgcagaagaggcaaaggccacgacggactgtaccagggactcagcaccgccaccaaggacacctatgacgctcttcacatgcaggccctgccgcctcgg

SEQ ID NO: 179 - protein, 5 aa, Artificial Sequence
  source: /note="Description of Artificial Sequence: Synthetic peptide"
  VARIANT (1)..(1): /replace="Ser"
  VARIANT (3)..(3): /replace="Arg"
  VARIANT (5)..(5): /replace="Asn"
  SITE (1)..(5): /note="Variant residues given in the sequence have no preference with respect to those in the annotations for variant positions"
GFWMS

SEQ ID NO: 180 - protein, 17 aa, Artificial Sequence
  source: /note="Description of Artificial Sequence: Synthetic peptide"
  VARIANT (1)..(1): /replace="Ser"
  VARIANT (3)..(3): /replace="Ser"
  VARIANT (4)..(4): /replace="Ser"
  VARIANT (5)..(5): /replace="Ser"
  VARIANT (6)..(6): /replace="Ser"
  VARIANT (8)..(8): /replace="Tyr"
  VARIANT (9)..(9): /replace="Ile"
  VARIANT (12)..(12): /replace="Ala"
  VARIANT (16)..(16): /replace="Lys"
  SITE (1)..(17): /note="Variant residues given in the sequence have no preference with respect to those in the annotations for variant positions"
NIKQDGSEKYYVDSVRG

SEQ ID NO: 181 - protein, 9 aa, Artificial Sequence
  source: /note="Description of Artificial Sequence: Synthetic peptide"
  VARIANT (1)..(1): /replace="Trp"
  VARIANT (3)..(3): /replace="Ser"
  SITE (1)..(9): /note="Variant residues given in the sequence have no preference with respect to those in the annotations for variant positions"
ALDYYGMDV

SEQ ID NO: 182 - protein, 7 aa, Artificial Sequence
  source: /note="Description of Artificial Sequence: Synthetic peptide"
  VARIANT (4)..(4): /replace="Phe"
  SITE (1)..(7): /note="Variant residues given in the sequence have no preference with respect to those in the annotations for variant positions"
TLSYRAS

SEQ ID NO: 183 - protein, 10 aa, Artificial Sequence
  source: /note="Description of Artificial Sequence: Synthetic peptide"
  VARIANT (1)..(1): /replace="Met"
  VARIANT (4)..(4): /replace="Ile"
  VARIANT (5)..(5): /replace="Gly"
  VARIANT (8)..(8): /replace=" "
  SITE (1)..(10): /note="Variant residues given in the sequence have no preference with respect to those in the annotations for variant positions"
TQRLEFPSIT

SEQ ID NO: 184 - protein, 7 aa, Artificial Sequence
  source: /note="Description of Artificial Sequence: Synthetic peptide"
  VARIANT (6)..(6): /replace="Ser"
  SITE (1)..(7): /note="Variant residues given in the sequence have no preference with respect to those in the annotations for variant positions"
GFTFSGF

SEQ ID NO: 185 - protein, 6 aa, Artificial Sequence
  source: /note="Description of Artificial Sequence: Synthetic peptide"
  VARIANT (1)..(1): /replace="Ser"
  VARIANT (2)..(2): /replace="Ser"
  VARIANT (3)..(3): /replace="Ser"
  VARIANT (4)..(4): /replace="Ser"
  VARIANT (6)..(6): /replace="Tyr"
  SITE (1)..(6): /note="Variant residues given in the sequence have no preference with respect to those in the annotations for variant positions"
KQDGSE

SEQ ID NO: 186 - protein, 7 aa, Artificial Sequence
  source: /note="Description of Artificial Sequence: Synthetic peptide"
  VARIANT (2)..(2): /replace="Ile"
  VARIANT (3)..(3): /replace="Gly"
  VARIANT (6)..(6): /replace=" "
  SITE (1)..(7): /note="Variant residues given in the sequence have no preference with respect to those in the annotations for variant positions"
RLEFPSI

SEQ ID NO: 187 - protein, 8 aa, Artificial Sequence
  source: /note="Description of Artificial Sequence: Synthetic peptide"
  VARIANT (6)..(6): /replace="Ser"
  VARIANT (8)..(8): /replace="Arg"
  SITE (1)..(8): /note="Variant residues given in the sequence have no preference with respect to those in the annotations for variant positions"
GFTFSGFW

SEQ ID NO: 188 - protein, 8 aa, Artificial Sequence
  source: /note="Description of Artificial Sequence: Synthetic peptide"
  VARIANT (2)..(2): /replace="Ser"
  VARIANT (3)..(3): /replace="Ser"
  VARIANT (4)..(4): /replace="Ser"
  VARIANT (5)..(5): /replace="Ser"
  VARIANT (7)..(7): /replace="Tyr"
  VARIANT (8)..(8): /replace="Ile"
  SITE (1)..(8): /note="Variant residues given in the sequence have no preference with respect to those in the annotations for variant positions"
IKQDGSEK

SEQ ID NO: 189 - protein, 11 aa, Artificial Sequence
  source: /note="Description of Artificial Sequence: Synthetic peptide"
  VARIANT (3)..(3): /replace="Trp"
  VARIANT (5)..(5): /replace="Ser"
  SITE (1)..(11): /note="Variant residues given in the sequence have no preference with respect to those in the annotations for variant positions"
ARALDYYGMDV

SEQ ID NO: 190-201 - skipped (12 entries)

SEQ ID NO: 202 - protein, 69 aa, Artificial Sequence
  source: /note="Description of Artificial Sequence: Synthetic polypeptide"
TTTPAPRPPTPAPTIASQPLSLRPEACRPAAGGAVHTRGLDFACDIYIWAPLAGTCGVLLLSLVITLYC

SEQ ID NO: 203-224 - skipped (22 entries)

SEQ ID NO: 225 - protein, 465 aa, Artificial Sequence
  source: /note="Description of Artificial Sequence: Synthetic polypeptide"
EIVMTQSPATLSLSPGERATLSCRASQDISKYLNWYQQKPGQAPRLLIYHTSRLHSGIPARFSGSGSGTDYTLTISSLQPEDFAVYFCQQGNTLPYTFGQGTKLEIKGGGGSGGGGSGGGGSQVQLQESGPGLVKPSETLSLTCTVSGVSLPDYGVSWIRQPPGKGLEWIGVIWGSETTYYQSSLKSRVTISKDNSKNQVSLKLSSVTAADTAVYYCAKHYYYGGSYAMDYWGQGTLVTVSSTTTPAPRPPTPAPTIASQPLSLRPEACRPAAGGAVHTRGLDFACDIYIWAPLAGTCGVLLLSLVITLYCKRGRKKLLYIFKQPFMRPVQTTQEEDGCSCRFPEEEEGGCELRVKFSRSADAPAYQQGQNQLYNELNLGRREEYDVLDKRRGRDPEMGGKPRRKNPQEGLYNELQKDKMAEAYSEIGMKGERRRGKGHDGLYQGLSTATKDTYDALHMQALPPR

SEQ ID NO: 226-249 - skipped (24 entries)

SEQ ID NO: 250 - protein, 120 aa, Artificial Sequence
  source: /note="Description of Artificial Sequence: Synthetic polypeptide"
QVQLQESGPGLVKPSETLSLTCTVSGVSLPDYGVSWIRQPPGKGLEWIGVIWGSETTYYQSSLKSRVTISKDNSKNQVSLKLSSVTAADTAVYYCAKHYYYGGSYAMDYWGQGTLVTVSS

SEQ ID NO: 251 - protein, 107 aa, Artificial Sequence
  source: /note="Description of Artificial Sequence: Synthetic polypeptide"
EIVMTQSPATLSLSPGERATLSCRASQDISKYLNWYQQKPGQAPRLLIYHTSRLHSGIPARFSGSGSGTDYTLTISSLQPEDFAVYFCQQGNTLPYTFGQGTKLEIK

SEQ ID NO: 252 - DNA, 63 bp, Artificial Sequence
  source: /note="Description of Artificial Sequence: Synthetic oligonucleotide"
atggccctccctgtcaccgctctgttgctgccgcttgctctgctgctccacgcagcgcgaccg

SEQ ID NO: 253 - DNA, 747 bp, Artificial Sequence
  source: /note="Description of Artificial Sequence: Synthetic polynucleotide"
caggtacaattgcaggagtctggaggcggtgtggtgcaacccggtcgcagcttgcgcctgagttgtgctgcgtctggatttacattttcatcttacggaatgcattgggtacgccaggcaccggggaaaggccttgaatgggtggctgtaatttcatacgatggttccaacaaatactatgctgactcagtcaagggtcgatttacaattagtcgggacaactccaagaacaccctttatcttcaaatgaattcccttagagcagaggatacggcggtctattactgtggtggcagtggttatgcacttcatgatgattactatggcttggatgtctgggggcaagggacgcttgtaactgtatcctctggtggtggtggtagtggtgggggaggctccggcggtggcggctctcaatctgctctgactcaaccagcaagcgtatcagggtcaccgggacagagtattaccataagttgcacggggacctctagcgatgtaggggggtataattatgtatcttggtatcaacaacaccccgggaaagcccctaaattgatgatctacgacgtgagcaatcgacctagtggcgtatcaaatcgcttctctggtagcaagagtgggaatacggcgtcccttactattagcggattgcaagcagaagatgaggccgattactactgcagctcctatactagctcttctacattgtacgtctttgggagcggaacaaaagtaacagtactc

SEQ ID NO: 254 - DNA, 207 bp, Artificial Sequence
  source: /note="Description of Artificial Sequence: Synthetic polynucleotide"
acaacaacacctgccccgagaccgcctacaccagccccgactattgccagccagcctctgagcctcaggcctgaggcctgtaggcccgcagcgggcggcgcagttcatacacggggcttggatttcgcttgtgatatttatatttgggctcctttggcggggacatgtggcgtgctgcttctgtcacttgttattacactgtactgt

SEQ ID NO: 255 - DNA, 126 bp, Artificial Sequence
  source: /note="Description of Artificial Sequence: Synthetic polynucleotide"
aaacgcgggcgaaaaaaattgctgtatatttttaagcagccatttatgaggcccgttcagacgacgcaggaggaggacggttgctcttgcaggttcccagaagaggaagaagggggctgtgaattg

SEQ ID NO: 256 - DNA, 336 bp, Artificial Sequence
  source: /note="Description of Artificial Sequence: Synthetic polynucleotide"
cgggttaaattttcaagatccgcagacgctccagcataccaacagggacaaaaccaactctataacgagctgaatcttggaagaagggaggaatatgatgtgctggataaacggcgcggtagagatccggagatgggcggaaaaccaaggcgaaaaaaccctcaggagggactctacaacgaactgcagaaagacaaaatggcggaggcttattccgaaataggcatgaagggcgagcggaggcgagggaaagggcacgacggactgtatcaaggcctctcaaccgcgactaaggatacgtacgacgccctgcacatgcaggccctgcctccgaga

SEQ ID NO: 257 - protein, 493 aa, Artificial Sequence
  source: /note="Description of Artificial Sequence: Synthetic polypeptide"
MALPVTALLLPLALLLHAARPQVQLQESGGGVVQPGRSLRLSCAASGFTFSSYGMHWVRQAPGKGLEWVAVISYDGSNKYYADSVKGRFTISRDNSKNTLYLQMNSLRAEDTAVYYCGGSGYALHDDYYGLDVWGQGTLVTVSSGGGGSGGGGSGGGGSQSALTQPASVSGSPGQSITISCTGTSSDVGGYNYVSWYQQHPGKAPKLMIYDVSNRPSGVSNRFSGSKSGNTASLTISGLQAEDEADYYCSSYTSSSTLYVFGSGTKVTVLTTTPAPRPPTPAPTIASQPLSLRPEACRPAAGGAVHTRGLDFACDIYIWAPLAGTCGVLLLSLVITLYCKRGRKKLLYIFKQPFMRPVQTTQEEDGCSCRFPEEEEGGCELRVKFSRSADAPAYQQGQNQLYNELNLGRREEYDVLDKRRGRDPEMGGKPRRKNPQEGLYNELQKDKMAEAYSEIGMKGERRRGKGHDGLYQGLSTATKDTYDALHMQALPPR

SEQ ID NO: 258 - DNA, 1479 bp, Artificial Sequence
  source: /note="Description of Artificial Sequence: Synthetic polynucleotide"
atggccctccctgtcaccgctctgttgctgccgcttgctctgctgctccacgcagcgcgaccgcaggtacaattgcaggagtctggaggcggtgtggtgcaacccggtcgcagcttgcgcctgagttgtgctgcgtctggatttacattttcatcttacggaatgcattgggtacgccaggcaccggggaaaggccttgaatgggtggctgtaatttcatacgatggttccaacaaatactatgctgactcagtcaagggtcgatttacaattagtcgggacaactccaagaacaccctttatcttcaaatgaattcccttagagcagaggatacggcggtctattactgtggtggcagtggttatgcacttcatgatgattactatggcttggatgtctgggggcaagggacgcttgtaactgtatcctctggtggtggtggtagtggtgggggaggctccggcggtggcggctctcaatctgctctgactcaaccagcaagcgtatcagggtcaccgggacagagtattaccataagttgcacggggacctctagcgatgtaggggggtataattatgtatcttggtatcaacaacaccccgggaaagcccctaaattgatgatctacgacgtgagcaatcgacctagtggcgtatcaaatcgcttctctggtagcaagagtgggaatacggcgtcccttactattagcggattgcaagcagaagatgaggccgattactactgcagctcctatactagctcttctacattgtacgtctttgggagcggaacaaaagtaacagtactcacaacaacacctgccccgagaccgcctacaccagccccgactattgccagccagcctctgagcctcaggcctgaggcctgtaggcccgcagcgggcggcgcagttcatacacggggcttggatttcgcttgtgatatttatatttgggctcctttggcggggacatgtggcgtgctgcttctgtcacttgttattacactgtactgtaaacgcgggcgaaaaaaattgctgtatatttttaagcagccatttatgaggcccgttcagacgacgcaggaggaggacggttgctcttgcaggttcccagaagaggaagaagggggctgtgaattgcgggttaaattttcaagatccgcagacgctccagcataccaacagggacaaaaccaactctataacgagctgaatcttggaagaagggaggaatatgatgtgctggataaacggcgcggtagagatccggagatgggcggaaaaccaaggcgaaaaaaccctcaggagggactctacaacgaactgcagaaagacaaaatggcggaggcttattccgaaataggcatgaagggcgagcggaggcgagggaaagggcacgacggactgtatcaaggcctctcaaccgcgactaaggatacgtacgacgccctgcacatgcaggccctgcctccgaga

SEQ ID NO: 259-299 - skipped (41 entries)

SEQ ID NO: 300 - protein, 9 aa, Artificial Sequence
  source: /note="Description of Artificial Sequence: Synthetic peptide"
QQGNTLPYT

SEQ ID NO: 301-330 - skipped (30 entries)

SEQ ID NO: 331 - protein, 120 aa, Artificial Sequence
  source: /note="Description of Artificial Sequence: Synthetic polypeptide"
QVQLQESGPGLVKPSETLSLTCTVSGVSLPDYGVSWIRQPPGKCLEWIGVIWGSETTYYQSSLKSRVTISKDNSKNQVSLKLSSVTAADTAVYYCAKHYYYGGSYAMDYWGQGTLVTVSS

SEQ ID NO: 332 - protein, 107 aa, Artificial Sequence
  source: /note="Description of Artificial Sequence: Synthetic polypeptide"
EIVMTQSPATLSLSPGERATLSCRASQDISKYLNWYQQKPGQAPRLLIYHTSRLHSGIPARFSGSGSGTDYTLTISSLQPEDFAVYFCQQGNTLPYTFGCGTKLEIK

SEQ ID NO: 333-348 - skipped (16 entries)

SEQ ID NO: 349 - protein, 486 aa, Artificial Sequence
  source: /note="Description of Artificial Sequence: Synthetic polypeptide"
MALPVTALLLPLALLLHAARPEIVMTQSPATLSLSPGERATLSCRASQDISKYLNWYQQKPGQAPRLLIYHTSRLHSGIPARFSGSGSGTDYTLTISSLQPEDFAVYFCQQGNTLPYTFGQGTKLEIKGGGGSGGGGSGGGGSQVQLQESGPGLVKPSETLSLTCTVSGVSLPDYGVSWIRQPPGKGLEWIGVIWGSETTYYQSSLKSRVTISKDNSKNQVSLKLSSVTAADTAVYYCAKHYYYGGSYAMDYWGQGTLVTVSSTTTPAPRPPTPAPTIASQPLSLRPEACRPAAGGAVHTRGLDFACDIYIWAPLAGTCGVLLLSLVITLYCKRGRKKLLYIFKQPFMRPVQTTQEEDGCSCRFPEEEEGGCELRVKFSRSADAPAYQQGQNQLYNELNLGRREEYDVLDKRRGRDPEMGGKPRRKNPQEGLYNELQKDKMAEAYSEIGMKGERRRGKGHDGLYQGLSTATKDTYDALHMQALPPR

SEQ ID NO: 350-353 - skipped (4 entries)

SEQ ID NO: 354 - DNA, 1461 bp, Artificial Sequence
  source: /note="Description of Artificial Sequence: Synthetic polynucleotide"
atggccctccctgtcaccgccctgctgcttccgctggctcttctgctccacgccgctcggcccgaaattgtgatgacccagtcacccgccactcttagcctttcacccggtgagcgcgcaaccctgtcttgcagagcctcccaagacatctcaaaataccttaattggtatcaacagaagcccggacaggctcctcgccttctgatctaccacaccagccggctccattctggaatccctgccaggttcagcggtagcggatctgggaccgactacaccctcactatcagctcactgcagccagaggacttcgctgtctatttctgtcagcaagggaacaccctgccctacacctttggacagggcaccaagctcgagattaaaggtggaggtggcagcggaggaggtgggtccggcggtggaggaagccaggtccaactccaagaaagcggaccgggtcttgtgaagccatcagaaactctttcactgacttgtactgtgagcggagtgtctctccccgattacggggtgtcttggatcagacagccaccggggaagggtctggaatggattggagtgatttggggctctgagactacttactaccaatcatccctcaagtcacgcgtcaccatctcaaaggacaactctaagaatcaggtgtcactgaaactgtcatctgtgaccgcagccgacaccgccgtgtactattgcgctaagcattactattatggcgggagctacgcaatggattactggggacagggtactctggtcaccgtgtccagcaccactaccccagcaccgaggccacccaccccggctcctaccatcgcctcccagcctctgtccctgcgtccggaggcatgtagacccgcagctggtggggccgtgcatacccggggtcttgacttcgcctgcgatatctacatttgggcccctctggctggtacttgcggggtcctgctgctttcactcgtgatcactctttactgtaagcgcggtcggaagaagctgctgtacatctttaagcaacccttcatgaggcctgtgcagactactcaagaggaggacggctgttcatgccggttcccagaggaggaggaaggcggctgcgaactgcgcgtgaaattcagccgcagcgcagatgctccagcctaccagcaggggcagaaccagctctacaacgaactcaatcttggtcggagagaggagtacgacgtgctggacaagcggagaggacgggacccagaaatgggcgggaagccgcgcagaaagaatccccaagagggcctgtacaacgagctccaaaaggataagatggcagaagcctatagcgagattggtatgaaaggggaacgcagaagaggcaaaggccacgacggactgtaccagggactcagcaccgccaccaaggacacctatgacgctcttcacatgcaggccctgccgcctcggtaa

SEQ ID NO: 355 - DNA, 1458 bp, Artificial Sequence
  source: /note="Description of Artificial Sequence: Synthetic polynucleotide"
atggccctccctgtcaccgccctgctgcttccgctggctcttctgctccacgccgctcggcccgaaattgtgatgacccagtcacccgccactcttagcctttcacccggtgagcgcgcaaccctgtcttgcagagcctcccaagacatctcaaaataccttaattggtatcaacagaagcccggacaggctcctcgccttctgatctaccacaccagccggctccattctggaatccctgccaggttcagcggtagcggatctgggaccgactacaccctcactatcagctcactgcagccagaggacttcgctgtctatttctgtcagcaagggaacaccctgccctacacctttggacagggcaccaagctcgagattaaaggtggaggtggcagcggaggaggtgggtccggcggtggaggaagccaggtccaactccaagaaagcggaccgggtcttgtgaagccatcagaaactctttcactgacttgtactgtgagcggagtgtctctccccgattacggggtgtcttggatcagacagccaccggggaagggtctggaatggattggagtgatttggggctctgagactacttactaccaatcatccctcaagtcacgcgtcaccatctcaaaggacaactctaagaatcaggtgtcactgaaactgtcatctgtgaccgcagccgacaccgccgtgtactattgcgctaagcattactattatggcgggagctacgcaatggattactggggacagggtactctggtcaccgtgtccagcaccactaccccagcaccgaggccacccaccccggctcctaccatcgcctcccagcctctgtccctgcgtccggaggcatgtagacccgcagctggtggggccgtgcatacccggggtcttgacttcgcctgcgatatctacatttgggcccctctggctggtacttgcggggtcctgctgctttcactcgtgatcactctttactgtaagcgcggtcggaagaagctgctgtacatctttaagcaacccttcatgaggcctgtgcagactactcaagaggaggacggctgttcatgccggttcccagaggaggaggaaggcggctgcgaactgcgcgtgaaattcagccgcagcgcagatgctccagcctaccagcaggggcagaaccagctctacaacgaactcaatcttggtcggagagaggagtacgacgtgctggacaagcggagaggacgggacccagaaatgggcgggaagccgcgcagaaagaatccccaagagggcctgtacaacgagctccaaaaggataagatggcagaagcctatagcgagattggtatgaaaggggaacgcagaagaggcaaaggccacgacggactgtaccagggactcagcaccgccaccaaggacacctatgacgctcttcacatgcaggccctgccgcctcgg

SEQ ID NO: 356 - DNA, 1398 bp, Artificial Sequence
  source: /note="Description of Artificial Sequence: Synthetic polynucleotide"
gaaattgtgatgacccagtcacccgccactcttagcctttcacccggtgagcgcgcaaccctgtcttgcagagcctcccaagacatctcaaaataccttaattggtatcaacagaagcccggacaggctcctcgccttctgatctaccacaccagccggctccattctggaatccctgccaggttcagcggtagcggatctgggaccgactacaccctcactatcagctcactgcagccagaggacttcgctgtctatttctgtcagcaagggaacaccctgccctacacctttggacagggcaccaagctcgagattaaaggtggaggtggcagcggaggaggtgggtccggcggtggaggaagccaggtccaactccaagaaagcggaccgggtcttgtgaagccatcagaaactctttcactgacttgtactgtgagcggagtgtctctccccgattacggggtgtcttggatcagacagccaccggggaagggtctggaatggattggagtgatttggggctctgagactacttactaccaatcatccctcaagtcacgcgtcaccatctcaaaggacaactctaagaatcaggtgtcactgaaactgtcatctgtgaccgcagccgacaccgccgtgtactattgcgctaagcattactattatggcgggagctacgcaatggattactggggacagggtactctggtcaccgtgtccagcaccactaccccagcaccgaggccacccaccccggctcctaccatcgcctcccagcctctgtccctgcgtccggaggcatgtagacccgcagctggtggggccgtgcatacccggggtcttgacttcgcctgcgatatctacatttgggcccctctggctggtacttgcggggtcctgctgctttcactcgtgatcactctttactgtaagcgcggtcggaagaagctgctgtacatctttaagcaacccttcatgaggcctgtgcagactactcaagaggaggacggctgttcatgccggttcccagaggaggaggaaggcggctgcgaactgcgcgtgaaattcagccgcagcgcagatgctccagcctaccagcaggggcagaaccagctctacaacgaactcaatcttggtcggagagaggagtacgacgtgctggacaagcggagaggacgggacccagaaatgggcgggaagccgcgcagaaagaatccccaagagggcctgtacaacgagctccaaaaggataagatggcagaagcctatagcgagattggtatgaaaggggaacgcagaagaggcaaaggccacgacggactgtaccagggactcagcaccgccaccaaggacacctatgacgctcttcacatgcaggccctgccgcctcggtaa

SEQ ID NO: 357-416 - skipped (60 entries)

SEQ ID NO: 417 - DNA, 1395 bp, Artificial Sequence
  source: /note="Description of Artificial Sequence: Synthetic polynucleotide"
gaaattgtgatgacccagtcacccgccactcttagcctttcacccggtgagcgcgcaaccctgtcttgcagagcctcccaagacatctcaaaataccttaattggtatcaacagaagcccggacaggctcctcgccttctgatctaccacaccagccggctccattctggaatccctgccaggttcagcggtagcggatctgggaccgactacaccctcactatcagctcactgcagccagaggacttcgctgtctatttctgtcagcaagggaacaccctgccctacacctttggacagggcaccaagctcgagattaaaggtggaggtggcagcggaggaggtgggtccggcggtggaggaagccaggtccaactccaagaaagcggaccgggtcttgtgaagccatcagaaactctttcactgacttgtactgtgagcggagtgtctctccccgattacggggtgtcttggatcagacagccaccggggaagggtctggaatggattggagtgatttggggctctgagactacttactaccaatcatccctcaagtcacgcgtcaccatctcaaaggacaactctaagaatcaggtgtcactgaaactgtcatctgtgaccgcagccgacaccgccgtgtactattgcgctaagcattactattatggcgggagctacgcaatggattactggggacagggtactctggtcaccgtgtccagcaccactaccccagcaccgaggccacccaccccggctcctaccatcgcctcccagcctctgtccctgcgtccggaggcatgtagacccgcagctggtggggccgtgcatacccggggtcttgacttcgcctgcgatatctacatttgggcccctctggctggtacttgcggggtcctgctgctttcactcgtgatcactctttactgtaagcgcggtcggaagaagctgctgtacatctttaagcaacccttcatgaggcctgtgcagactactcaagaggaggacggctgttcatgccggttcccagaggaggaggaaggcggctgcgaactgcgcgtgaaattcagccgcagcgcagatgctccagcctaccagcaggggcagaaccagctctacaacgaactcaatcttggtcggagagaggagtacgacgtgctggacaagcggagaggacgggacccagaaatgggcgggaagccgcgcagaaagaatccccaagagggcctgtacaacgagctccaaaaggataagatggcagaagcctatagcgagattggtatgaaaggggaacgcagaagaggcaaaggccacgacggactgtaccagggactcagcaccgccaccaaggacacctatgacgctcttcacatgcaggccctgccgcctcgg

SEQ ID NO: 418-419 - skipped (2 entries)

SEQ ID NO: 420 - protein, 10 aa, Artificial Sequence
  source: /note="Description of Artificial Sequence: Synthetic peptide"
SASSSVSYMN

SEQ ID NO: 421 - protein, 7 aa, Artificial Sequence
  source: /note="Description of Artificial Sequence: Synthetic peptide"
DTSKLAS

SEQ ID NO: 422 - protein, 9 aa, Artificial Sequence
  source: /note="Description of Artificial Sequence: Synthetic peptide"
QQWSSNPFT

SEQ ID NO: 423 - protein, 6 aa, Artificial Sequence
  source: /note="Description of Artificial Sequence: Synthetic peptide"
SSSVSY

SEQ ID NO: 424 - protein, 3 aa, Artificial Sequence
  source: /note="Description of Artificial Sequence: Synthetic peptide"
DTS

SEQ ID NO: 425 - protein, 6 aa, Artificial Sequence
  source: /note="Description of Artificial Sequence: Synthetic peptide"
WSSNPF

SEQ ID NO: 426 - protein, 5 aa, Artificial Sequence
  source: /note="Description of Artificial Sequence: Synthetic peptide"
SSVSY

SEQ ID NO: 427 - protein, 106 aa, Artificial Sequence [sequence omitted]

SEQ ID NO: 428 - protein, 10 aa, Artificial Sequence
  source: /note="Description of Artificial Sequence: Synthetic peptide"
GYTFTRYTMH

SEQ ID NO: 429 - protein, 17 aa, Artificial Sequence
  source: /note="Description of Artificial Sequence: Synthetic peptide"
YINPSRGYTNYNQKVKD

SEQ ID NO: 430 - protein, 10 aa, Artificial Sequence
  source: /note="Description of Artificial Sequence: Synthetic peptide"
YYDDHYSLDY

SEQ ID NO: 431 - protein, 5 aa, Artificial Sequence
  source: /note="Description of Artificial Sequence: Synthetic peptide"
RYTMH

SEQ ID NO: 432 - protein, 7 aa, Artificial Sequence
  source: /note="Description of Artificial Sequence: Synthetic peptide"
GYTFTRY

SEQ ID NO: 433 - protein, 6 aa, Artificial Sequence
  source: /note="Description of Artificial Sequence: Synthetic peptide"
NPSRGY

SEQ ID NO: 434 - protein, 8 aa, Artificial Sequence
  source: /note="Description of Artificial Sequence: Synthetic peptide"
GYTFTRYT

SEQ ID NO: 435 - protein, 8 aa, Artificial Sequence
  source: /note="Description of Artificial Sequence: Synthetic peptide"
INPSRGYT

SEQ ID NO: 436 - protein, 12 aa, Artificial Sequence
  source: /note="Description of Artificial Sequence: Synthetic peptide"
ARYYDDHYSLDY

SEQ ID NO: 437 - protein, 119 aa, Artificial Sequence
  source: /note="Description of Artificial Sequence: Synthetic polypeptide"
QVQLVQSGGGVVQPGRSLRLSCKASGYTFTRYTMHWVRQAPGKGLEWIGYINPSRGYTNYNQKVKDRFTISRDNSKNTAFLQMDSLRPEDTGVYFCARYYDDHYSLDYWGQGTPVTVSS

SEQ ID NO: 438 - protein, 14 aa, Artificial Sequence
  source: /note="Description of Artificial Sequence: Synthetic peptide"
GSSTGAVTSGNYPN

SEQ ID NO: 439 - protein, 7 aa, Artificial Sequence
  source: /note="Description of Artificial Sequence: Synthetic peptide"
GTKFLAP

SEQ ID NO: 440 - protein, 9 aa, Artificial Sequence
  source: /note="Description of Artificial Sequence: Synthetic peptide"
VLWYSNRWV

SEQ ID NO: 441 - protein, 10 aa, Artificial Sequence
  source: /note="Description of Artificial Sequence: Synthetic peptide"
STGAVTSGNY

SEQ ID NO: 442 - protein, 3 aa, Artificial Sequence
  source: /note="Description of Artificial Sequence: Synthetic peptide"
GTK

SEQ ID NO: 443 - protein, 6 aa, Artificial Sequence
  source: /note="Description of Artificial Sequence: Synthetic peptide"
WYSNRW

SEQ ID NO: 444 - protein, 9 aa, Artificial Sequence
  source: /note="Description of Artificial Sequence: Synthetic peptide"
TGAVTSGNY

SEQ ID NO: 445 - protein, 109 aa, Artificial Sequence
  source: /note="Description of Artificial Sequence: Synthetic polypeptide"
QTVVTQEPSLTVSPGGTVTLTCGSSTGAVTSGNYPNWVQQKPGQAPRGLIGGTKFLAPGTPARFSGSLLGGKAALTLSGVQPEDEAEYYCVLWYSNRWVFGGGTKLTVL

SEQ ID NO: 446 - protein, 109 aa, Artificial Sequence
  source: /note="Description of Artificial Sequence: Synthetic polypeptide"
QTVVTQEPSLTVSPGGTVTLTCGSSTGAVTSGNYPNWVQQKPGQAPRGLIGGTKFLAPGTPARFSGSLLGGKAALTLSGVQPEDEAEYYCVLWYSNRWVFGCGTKLTVL

SEQ ID NO: 447 - protein, 10 aa, Artificial Sequence
  source: /note="Description of Artificial Sequence: Synthetic peptide"
GFTFNKYAMN

SEQ ID NO: 448 - protein, 19 aa, Artificial Sequence
  source: /note="Description of Artificial Sequence: Synthetic peptide"
RIRSKYNNYATYYADSVKD

SEQ ID NO: 449 - protein, 14 aa, Artificial Sequence
  source: /note="Description of Artificial Sequence: Synthetic peptide"
HGNFGNSYISYWAY

SEQ ID NO: 450 - protein, 5 aa, Artificial Sequence
  source: /note="Description of Artificial Sequence: Synthetic peptide"
KYAMN

SEQ ID NO: 451 - protein, 7 aa, Artificial Sequence
  source: /note="Description of Artificial Sequence: Synthetic peptide"
GFTFNKY

SEQ ID NO: 452 - protein, 8 aa, Artificial Sequence
  source: /note="Description of Artificial Sequence: Synthetic peptide"
RSKYNNYA

SEQ ID NO: 453 - protein, 8 aa, Artificial Sequence
  source: /note="Description of Artificial Sequence: Synthetic peptide"
GFTFNKYA

SEQ ID NO: 454 - protein, 10 aa, Artificial Sequence
  source: /note="Description of Artificial Sequence: Synthetic peptide"
IRSKYNNYAT

SEQ ID NO: 455 - protein, 16 aa, Artificial Sequence
  source: /note="Description of Artificial Sequence: Synthetic peptide"
VRHGNFGNSYISYWAY

SEQ ID NO: 456 - protein, 125 aa, Artificial Sequence
  source: /note="Description of Artificial Sequence: Synthetic polypeptide"
EVQLVESGGGLVQPGGSLKLSCAASGFTFNKYAMNWVRQAPGKGLEWVARIRSKYNNYATYYADSVKDRFTISRDDSKNTAYLQMNNLKTEDTAVYYCVRHGNFGNSYISYWAYWGQGTLVTVSS

SEQ ID NO: 457 - protein, 125 aa, Artificial Sequence
  source: /note="Description of Artificial Sequence: Synthetic polypeptide"
EVQLVESGGGLVQPGGSLKLSCAASGFTFNKYAMNWVRQAPGKCLEWVARIRSKYNNYATYYADSVKDRFTISRDDSKNTAYLQMNNLKTEDTAVYYCVRHGNFGNSYISYWAYWGQGTLVTVSS

SEQ ID NO: 458 - protein, 14 aa, Artificial Sequence
  source: /note="Description of Artificial Sequence: Synthetic peptide"
RSSTGAVTTSNYAN

SEQ ID NO: 459 - protein, 7 aa, Artificial Sequence
  source: /note="Description of Artificial Sequence: Synthetic peptide"
GTNKRAP

SEQ ID NO: 460 - protein, 9 aa, Artificial Sequence
  source: /note="Description of Artificial Sequence: Synthetic peptide"
ALWYSNLWV

SEQ ID NO: 461 - protein, 10 aa, Artificial Sequence
  source: /note="Description of Artificial Sequence: Synthetic peptide"
STGAVTTSNY

SEQ ID NO: 462 - protein, 3 aa, Artificial Sequence
  source: /note="Description of Artificial Sequence: Synthetic peptide"
GTN

SEQ ID NO: 463 - protein, 6 aa, Artificial Sequence
  source: /note="Description of Artificial Sequence: Synthetic peptide"
WYSNLW

SEQ ID NO: 464 - protein, 9 aa, Artificial Sequence
  source: /note="Description of Artificial Sequence: Synthetic peptide"
TGAVTTSNY

SEQ ID NO: 465 - protein, 3 aa, Artificial Sequence
  source: /note="Description of Artificial Sequence: Synthetic peptide"
GGT

SEQ ID NO: 466 - protein, 7 aa, Artificial Sequence
  source: /note="Description of Artificial Sequence: Synthetic peptide"
ALWYSNL

SEQ ID NO: 467 - protein, 109 aa, Artificial Sequence
  source: /note="Description of Artificial Sequence: Synthetic polypeptide"
QAVVTQEPSLTVSPGGTVTLTCRSSTGAVTTSNYANWVQQKPGQAPRGLIGGTNKRAPWTPARFSGSLLGDKAALTLSGAQPEDEAEYFCALWYSNLWVFGGGTKLTVL

SEQ ID NO: 468 - protein, 109 aa, Artificial Sequence
  source: /note="Description of Artificial Sequence: Synthetic polypeptide"
QAVVTQEPSLTVSPGGTVTLTCRSSTGAVTTSNYANWVQQKPGQAPRGLIGGTNKRAPWTPARFSGSLLGDKAALTLSGAQPEDEAEYFCALWYSNLWVFGCGTKLTVL

SEQ ID NO: 469 - protein, 10 aa, Artificial Sequence
  source: /note="Description of Artificial Sequence: Synthetic peptide"
GFTFNTYAMN

SEQ ID NO: 470 - protein, 14 aa, Artificial Sequence
  source: /note="Description of Artificial Sequence: Synthetic peptide"
HGNFGNSYVSWFAY

SEQ ID NO: 471 - protein, 5 aa, Artificial Sequence
  source: /note="Description of Artificial Sequence: Synthetic peptide"
TYAMN

SEQ ID NO: 472 - protein, 7 aa, Artificial Sequence
  source: /note="Description of Artificial Sequence: Synthetic peptide"
GFTFNTY

SEQ ID NO: 473 - protein, 8 aa, Artificial Sequence
  source: /note="Description of Artificial Sequence: Synthetic peptide"
GFTFNTYA

SEQ ID NO: 474 - protein, 16 aa, Artificial Sequence
  source: /note="Description of Artificial Sequence: Synthetic peptide"
VRHGNFGNSYVSWFAY

SEQ ID NO: 475 - protein, 125 aa, Artificial Sequence
  source: /note="Description of Artificial Sequence: Synthetic polypeptide"
EVQLVESGGGLVQPGGSLKLSCAASGFTFNTYAMNWVRQASGKGLEWVGRIRSKYNNYATYYADSVKDRFTISRDDSKSTLYLQMNSLKTEDTAVYYCVRHGNFGNSYVSWFAYWGQGTLVTVSS

SEQ ID NO: 476 - protein, 125 aa, Artificial Sequence
  source: /note="Description of Artificial Sequence: Synthetic polypeptide"
EVQLVESGGGLVQPGGSLKLSCAASGFTFNTYAMNWVRQASGKCLEWVGRIRSKYNNYATYYADSVKDRFTISRDDSKSTLYLQMNSLKTEDTAVYYCVRHGNFGNSYVSWFAYWGQGTLVTVSS

SEQ ID NO: 477 - protein, 16 aa, Artificial Sequence
  source: /note="Description of Artificial Sequence: Synthetic peptide"
RSSQSLVRSEGTTYFN

SEQ ID NO: 478 - protein, 7 aa, Artificial Sequence
  source: /note="Description of Artificial Sequence: Synthetic peptide"
RVSNRFS

SEQ ID NO: 479 - protein, 9 aa, Artificial Sequence
  source: /note="Description of Artificial Sequence: Synthetic peptide"
LQSSHFPWT

SEQ ID NO: 480 - protein, 12 aa, Artificial Sequence
  source: /note="Description of Artificial Sequence: Synthetic peptide"
SQSLVRSEGTTY

SEQ ID NO: 481 - protein, 3 aa, Artificial Sequence
  source: /note="Description of Artificial Sequence: Synthetic peptide"
RVS

SEQ ID NO: 482 - protein, 6 aa, Artificial Sequence
  source: /note="Description of Artificial Sequence: Synthetic peptide"
SSHFPW

SEQ ID NO: 483 - protein, 11 aa, Artificial Sequence
  source: /note="Description of Artificial Sequence: Synthetic peptide"
QSLVRSEGTTY

SEQ ID NO: 484 - protein, 112 aa, Artificial Sequence
  source: /note="Description of Artificial Sequence: Synthetic polypeptide"
DILVTQTPVSLPVSLGGHVSISCRSSQSLVRSEGTTYFNWYLQKPGQSPQLLIYRVSNRFSGVPDRFSGSGSGTDFTLKISRVEPEDLGVYYCLQSSHFPWTFGGGTKLELK

SEQ ID NO: 485 - protein, 10 aa, Artificial Sequence
  source: /note="Description of Artificial Sequence: Synthetic peptide"
GFTFSKQGMH

SEQ ID NO: 486 - protein, 17 aa, Artificial Sequence
  source: /note="Description of Artificial Sequence: Synthetic peptide"
MIYYDSSKMYYADTVKG

SEQ ID NO: 487 - protein, 9 aa, Artificial Sequence
  source: /note="Description of Artificial Sequence: Synthetic peptide"
FWWDLDFDH

SEQ ID NO: 488 - protein, 5 aa, Artificial Sequence
  source: /note="Description of Artificial Sequence: Synthetic peptide"
KQGMH

SEQ ID NO: 489 - protein, 7 aa, Artificial Sequence
  source: /note="Description of Artificial Sequence: Synthetic peptide"
GFTFSKQ

SEQ ID NO: 490 - protein, 6 aa, Artificial Sequence
  source: /note="Description of Artificial Sequence: Synthetic peptide"
YYDSSK

SEQ ID NO: 491 - protein, 8 aa, Artificial Sequence
  source: /note="Description of Artificial Sequence: Synthetic peptide"
GFTFSKQG

SEQ ID NO: 492 - protein, 8 aa, Artificial Sequence
  source: /note="Description of Artificial Sequence: Synthetic peptide"
IYYDSSKM

SEQ ID NO: 493 - protein, 11 aa, Artificial Sequence
  source: /note="Description of Artificial Sequence: Synthetic peptide"
ASFWWDLDFDH

SEQ ID NO: 494 - protein, 118 aa, Artificial Sequence
  source: /note="Description of Artificial Sequence: Synthetic polypeptide"
EVKLVESGGDLVQPGDSLTLSCVASGFTFSKQGMHWIRQAPKKGLEWIAMIYYDSSKMYYADTVKGRFTISRDNSKNTLYLEMNSLRSEDTAMYYCASFWWDLDFDHWGQGVMVTVSS

SEQ ID NO: 495 - protein, 10 aa, Artificial Sequence
  source: /note="Description of Artificial Sequence: Synthetic peptide"
SATSSVSYMH

SEQ ID NO: 496 - protein, 9 aa, Artificial Sequence
  source: /note="Description of Artificial Sequence: Synthetic peptide"
QQWSSNPLT

SEQ ID NO: 497 - protein, 6 aa, Artificial Sequence
  source: /note="Description of Artificial Sequence: Synthetic peptide"
TSSVSY

SEQ ID NO: 498 - protein, 6 aa, Artificial Sequence
  source: /note="Description of Artificial Sequence: Synthetic peptide"
WSSNPL

SEQ ID NO: 499 - protein, 106 aa, Artificial Sequence
  source: /note="Description of Artificial Sequence: Synthetic polypeptide"
QIVLTQSPAIMSASPGEKVTMTCSATSSVSYMHWYQQKSGTSPKRWIYDTSKLASGVPARFSGSGSGTSYSLTISSMEAEDAATYYCQQWSSNPLTFGAGTKLELK

SEQ ID NO: 500 - protein, 10 aa, Artificial Sequence
  source: /note="Description of Artificial Sequence: Synthetic peptide"
GYKFTSYVMH

SEQ ID NO: 501 - protein, 17 aa, Artificial Sequence
  source: /note="Description of Artificial Sequence: Synthetic peptide"
YINPYNDVTKYNEKFKG

SEQ ID NO: 502 - protein, 11 aa, Artificial Sequence
  source: /note="Description of Artificial Sequence: Synthetic peptide"
GSYYDYDGFVY

SEQ ID NO: 503 - protein, 5 aa, Artificial Sequence
  source: /note="Description of Artificial Sequence: Synthetic peptide"
SYVMH

SEQ ID NO: 504 - protein, 7 aa, Artificial Sequence
  source: /note="Description of Artificial Sequence: Synthetic peptide"
GYKFTSY

SEQ ID NO: 505 - protein, 6 aa, Artificial Sequence
  source: /note="Description of Artificial Sequence: Synthetic peptide"
NPYNDV

SEQ ID NO: 506 - protein, 8 aa, Artificial Sequence
  source: /note="Description of Artificial Sequence: Synthetic peptide"
GYKFTSYV

SEQ ID NO: 507 - protein, 8 aa, Artificial Sequence
  source: /note="Description of Artificial Sequence: Synthetic peptide"
INPYNDVT

SEQ ID NO: 508 - protein, 13 aa, Artificial Sequence
  source: /note="Description of Artificial Sequence: Synthetic peptide"
ARGSYYDYDGFVY

SEQ ID NO: 509 - protein, 120 aa, Artificial Sequence
  source: /note="Description of Artificial Sequence: Synthetic polypeptide"
EVQLQQSGPELVKPGASVKMSCKASGYKFTSYVMHWVKQKPGQGLEWIGYINPYNDVTKYNEKFKGKATLTSDKSSSTAYMELSSLTSEDSAVHYCARGSYYDYDGFVYWGQGTLVTVSA

SEQ ID NO: 510 - protein, 11 aa, Artificial Sequence
  source: /note="Description of Artificial Sequence: Synthetic peptide"
HASQNIYVWLN

SEQ ID NO: 511 - protein, 7 aa, Artificial Sequence
  source: /note="Description of Artificial Sequence: Synthetic peptide"
KASNLHT

SEQ ID NO: 512 - protein, 9 aa, Artificial Sequence
  source: /note="Description of Artificial Sequence: Synthetic peptide"
QQGQTYPYT

SEQ ID NO: 513 - protein, 7 aa, Artificial Sequence
  source: /note="Description of Artificial Sequence: Synthetic peptide"
SQNIYVW

SEQ ID NO: 514 - protein, 3 aa, Artificial Sequence
  source: /note="Description of Artificial Sequence: Synthetic peptide"
KAS

SEQ ID NO: 515 - protein, 6 aa, Artificial Sequence
  source: /note="Description of Artificial Sequence: Synthetic peptide"
GQTYPY

SEQ ID NO: 516 - protein, 6 aa, Artificial Sequence
  source: /note="Description of Artificial Sequence: Synthetic peptide"
QNIYVW

SEQ ID NO: 517 - protein, 107 aa, Artificial Sequence
  source: /note="Description of Artificial Sequence: Synthetic polypeptide"
DIQMTQSPSSLSASVGDRVTITCHASQNIYVWLNWYQQKPGKAPKLLIYKASNLHTGVPSRFSGSGSGTDFTLTISSLQPEDFATYYCQQGQTYPYTFGGGTKVEIK

SEQ ID NO: 518 - protein, 214 aa, Artificial Sequence
  source: /note="Description of Artificial Sequence: Synthetic polypeptide"
DIQMTQSPSSLSASVGDRVTITCHASQNIYVWLNWYQQKPGKAPKLLIYKASNLHTGVPSRFSGSGSGTDFTLTISSLQPEDFATYYCQQGQTYPYTFGGGTKVEIKRTVAAPSVFIFPPSDEQLKSGTASVVCLLNNFYPREAKVQWKVDNALQSGNSQESVTEQDSKDSTYSLSSTLTLSKADYEKHKVYACEVTHQGLSSPVTKSFNRGEC

SEQ ID NO: 519 - protein, 10 aa, Artificial Sequence
  source: /note="Description of Artificial Sequence: Synthetic peptide"
GYTFTSYYIH

SEQ ID NO: 520 - protein, 17 aa, Artificial Sequence
  source: /note="Description of Artificial Sequence: Synthetic peptide"
CIYPGNVNTNYNEKFKD

SEQ ID NO: 521 - protein, 11 aa, Artificial Sequence
  source: /note="Description of Artificial Sequence: Synthetic peptide"
SHYGLDWNFDV

SEQ ID NO: 522 - protein, 5 aa, Artificial Sequence
  source: /note="Description of Artificial Sequence: Synthetic peptide"
SYYIH

SEQ ID NO: 523 - protein, 7 aa, Artificial Sequence
  source: /note="Description of Artificial Sequence: Synthetic peptide"
GYTFTSY

SEQ ID NO: 524 - protein, 6 aa, Artificial Sequence
  source: /note="Description of Artificial Sequence: Synthetic peptide"
YPGNVN

SEQ ID NO: 525 - protein, 8 aa, Artificial Sequence
  source: /note="Description of Artificial Sequence: Synthetic peptide"
GYTFTSYY

SEQ ID NO: 526 - protein, 8 aa, Artificial Sequence
  source: /note="Description of Artificial Sequence: Synthetic peptide"
IYPGNVNT

SEQ ID NO: 527 - protein, 13 aa, Artificial Sequence
  source: /note="Description of Artificial Sequence: Synthetic peptide"
TRSHYGLDWNFDV

SEQ ID NO: 528 - protein, 120 aa, Artificial Sequence
  source: /note="Description of Artificial Sequence: Synthetic polypeptide"
QVQLVQSGAEVKKPGASVKVSCKASGYTFTSYYIHWVRQAPGQGLEWIGCIYPGNVNTNYNEKFKDRATLTVDTSISTAYMELSRLRSDDTAVYFCTRSHYGLDWNFDVWGQGTTVTVSS

SEQ ID NO: 529 - protein, 223 aa, Artificial Sequence
  source: /note="Description of Artificial Sequence: Synthetic polypeptide"
QVQLVQSGAEVKKPGASVKVSCKASGYTFTSYYIHWVRQAPGQGLEWIGCIYPGNVNTNYNEKFKDRATLTVDTSISTAYMELSRLRSDDTAVYFCTRSHYGLDWNFDVWGQGTTVTVSSASTKGPSVFPLAPSSKSTSGGTAALGCLVKDYFPEPVTVSWNSGALTSGVHTFPAVLQSSGLYSLSSVVTVPSSSLGTQTYICNVNHKPSNTKVDKRVEPKSC

SEQ ID NO: 530 - protein, 13 aa, Artificial Sequence
  source: /note="Description of Artificial Sequence: Synthetic peptide"
SGSSSNIVSNYVN

SEQ ID NO: 531 - protein, 7 aa, Artificial Sequence
  source: /note="Description of Artificial Sequence: Synthetic peptide"
DNNKRPS

SEQ ID NO: 532 - protein, 11 aa, Artificial Sequence
  source: /note="Description of Artificial Sequence: Synthetic peptide"
QSYAIGSYSVV

SEQ ID NO: 533 - protein, 9 aa, Artificial Sequence
  source: /note="Description of Artificial Sequence: Synthetic peptide"
SSSNIVSNY

SEQ ID NO: 534 - protein, 3 aa, Artificial Sequence
  source: /note="Description of Artificial Sequence: Synthetic peptide"
DNN

SEQ ID NO: 535 - protein, 8 aa, Artificial Sequence
  source: /note="Description of Artificial Sequence: Synthetic peptide"
YAIGSYSV

SEQ ID NO: 536 - protein, 8 aa, Artificial Sequence
  source: /note="Description of Artificial Sequence: Synthetic peptide"
SSNIVSNY

SEQ ID NO: 537 - protein, 110 aa, Artificial Sequence
  source: /note="Description of Artificial Sequence: Synthetic polypeptide"
DIVLTQPPSVSGAPGQRVTISCSGSSSNIVSNYVNWYQQLPGTAPKLLIYDNNKRPSGVPDRFSGSKSGTSASLAITGLQSEDEADYYCQSYAIGSYSVVFGGGTKLTVL

SEQ ID NO: 538 - protein, 10 aa, Artificial Sequence
  source: /note="Description of Artificial Sequence: Synthetic peptide"
GFTFSTYGMS

SEQ ID NO: 539 - protein, 17 aa, Artificial Sequence
  source: /note="Description of Artificial Sequence: Synthetic peptide"
SIFYTGSSTYYADSVKG

SEQ ID NO: 540 - protein, 11 aa, Artificial Sequence
  source: /note="Description of Artificial Sequence: Synthetic peptide"
IGYAGDSKYAI

SEQ ID NO: 541 - protein, 5 aa, Artificial Sequence
  source: /note="Description of Artificial Sequence: Synthetic peptide"
TYGMS

SEQ ID NO: 542 - protein, 7 aa, Artificial Sequence
  source: /note="Description of Artificial Sequence: Synthetic peptide"
GFTFSTY

SEQ ID NO: 543 - protein, 6 aa, Artificial Sequence
  source: /note="Description of Artificial Sequence: Synthetic peptide"
FYTGSS

SEQ ID NO: 544 - protein, 8 aa, Artificial Sequence
  source: /note="Description of Artificial Sequence: Synthetic peptide"
GFTFSTYG

SEQ ID NO: 545 - protein, 8 aa, Artificial Sequence
  source: /note="Description of Artificial Sequence: Synthetic peptide"
IFYTGSST

SEQ ID NO: 546 - protein, 13 aa, Artificial Sequence
  source: /note="Description of Artificial Sequence: Synthetic peptide"
ARIGYAGDSKYAI

SEQ ID NO: 547 - protein, 120 aa, Artificial Sequence
  source: /note="Description of Artificial Sequence: Synthetic polypeptide"
QVQLVESGGGLVQPGGSLRLSCAASGFTFSTYGMSWVRQAPGKGLEWVSSIFYTGSSTYYADSVKGRFTISRDNSKNTLYLQMNSLRAEDTAVYYCARIGYAGDSKYAIWGQGTLVTVSS

SEQ ID NO: 548 - protein, 120 aa, Artificial Sequence
  source: /note="Description of Artificial Sequence: Synthetic polypeptide"
EVQLVESGGGLVQPGGSLRLSCAASGFTFSTYGMSWVRQAPGKGLEWVSSIFYTGSSTYYADSVKGRFTISRDNSKNTLYLQMNSLRAEDTAVYYCARIGYAGDSKYAIWGQGTLVTVSS

SEQ ID NO: 549 - protein, 15 aa, Artificial Sequence
  source: /note="Description of Artificial Sequence: Synthetic peptide"
KSSQSLLSGSFNYLT

SEQ ID NO: 550 - protein, 7 aa, Artificial Sequence
  source: /note="Description of Artificial Sequence: Synthetic peptide"
YASTRHT

SEQ ID NO: 551 - protein, 9 aa, Artificial Sequence
  source: /note="Description of Artificial Sequence: Synthetic peptide"
HHHYNAPPT

SEQ ID NO: 552 - protein, 11 aa, Artificial Sequence
  source: /note="Description of Artificial Sequence: Synthetic peptide"
SQSLLSGSFNY

SEQ ID NO: 553 - protein, 3 aa, Artificial Sequence
  source: /note="Description of Artificial Sequence: Synthetic peptide"
YAS

SEQ ID NO: 554 - protein, 6 aa, Artificial Sequence
  source: /note="Description of Artificial Sequence: Synthetic peptide"
HYNAPP

SEQ ID NO: 555 - protein, 10 aa, Artificial Sequence
  source: /note="Description of Artificial Sequence: Synthetic peptide"
QSLLSGSFNY

SEQ ID NO: 556 - protein, 111 aa, Artificial Sequence
  source: /note="Description of Artificial Sequence: Synthetic polypeptide"
DIVMTQSPDSLAVSLGERATINCKSSQSLLSGSFNYLTWYQQKPGQPPKLLIFYASTRHTGVPDRFSGSGSGTDFTLTISSLQAEDVAVYYCHHHYNAPPTFGPGTKVDIK

SEQ ID NO: 557 - protein, 218 aa, Artificial Sequence
  source: /note="Description of Artificial Sequence: Synthetic polypeptide"
DIVMTQSPDSLAVSLGERATINCKSSQSLLSGSFNYLTWYQQKPGQPPKLLIFYASTRHTGVPDRFSGSGSGTDFTLTISSLQAEDVAVYYCHHHYNAPPTFGPGTKVDIKRTVAAPSVFIFPPSDEQLKSGTASVVCLLNNFYPREAKVQWKVDNALQSGNSQESVTEQDSKDSTYSLSSTLTLSKADYEKHKVYACEVTHQGLSSPVTKSFNRGEC

SEQ ID NO: 558 - protein, 10 aa, Artificial Sequence
  source: /note="Description of Artificial Sequence: Synthetic peptide"
GFTFSDYWMD

SEQ ID NO: 559 - protein, 17 aa, Artificial Sequence
  source: /note="Description of Artificial Sequence: Synthetic peptide"
NIDEDGSITEYSPFVKG

SEQ ID NO: 560 - protein, 8 aa, Artificial Sequence
  source: /note="Description of Artificial Sequence: Synthetic peptide"
WGRFGFDS

SEQ ID NO: 561 - protein, 5 aa, Artificial Sequence
  source: /note="Description of Artificial Sequence: Synthetic peptide"
DYWMD

SEQ ID NO: 562 - protein, 7 aa, Artificial Sequence
  source: /note="Description of Artificial Sequence: Synthetic peptide"
GFTFSDY

SEQ ID NO: 563 - protein, 6 aa, Artificial Sequence
  source: /note="Description of Artificial Sequence: Synthetic peptide"
DEDGSI

SEQ ID NO: 564 - protein, 8 aa, Artificial Sequence
  source: /note="Description of Artificial Sequence: Synthetic peptide"
GFTFSDYW

SEQ ID NO: 565 - protein, 8 aa, Artificial Sequence
  source: /note="Description of Artificial Sequence: Synthetic peptide"
IDEDGSIT

SEQ ID NO: 566 - protein, 10 aa, Artificial Sequence
  source: /note="Description of Artificial Sequence: Synthetic peptide"
TRWGRFGFDS

SEQ ID NO: 567 - protein, 117 aa, Artificial Sequence
  source: /note="Description of Artificial Sequence: Synthetic polypeptide"
EVQLVESGGGLVQPGGSLRLSCAASGFTFSDYWMDWVRQAPGKGLVWVSNIDEDGSITEYSPFVKGRFTISRDNAKNTLYLQMNSLRAEDTAVYYCTRWGRFGFDSWGQGTLVTVSS

SEQ ID NO: 568 - protein, 11 aa, Artificial Sequence
  source: /note="Description of Artificial Sequence: Synthetic peptide"
RASQGISRWLA

SEQ ID NO: 569 - protein, 9 aa, Artificial Sequence
  source: /note="Description of Artificial Sequence: Synthetic peptide"
QQYNTYPRT

SEQ ID NO: 570 - protein, 7 aa, Artificial Sequence
  source: /note="Description of Artificial Sequence: Synthetic peptide"
SQGISRW

SEQ ID NO: 571 - protein, 6 aa, Artificial Sequence
  source: /note="Description of Artificial Sequence: Synthetic peptide"
YNTYPR

SEQ ID NO: 572 - protein, 6 aa, Artificial Sequence
  source: /note="Description of Artificial Sequence: Synthetic peptide"
QGISRW

SEQ ID NO: 573 - protein, 107 aa, Artificial Sequence
  source: /note="Description of Artificial Sequence: Synthetic polypeptide"
DIQMTQSPSSLSASVGDRVTITCRASQGISRWLAWYQQKPEKAPKSLIYAASSLQSGVPSRFSGSGSGTDFTLTISSLQPEDFATYYCQQYNTYPRTFGQGTKVEIK

SEQ ID NO: 574 - protein, 10 aa, Artificial Sequence
  source: /note="Description of Artificial Sequence: Synthetic peptide"
GFTFSSYDMH

SEQ ID NO: 575 - protein, 17 aa, Artificial Sequence
  source: /note="Description of Artificial Sequence: Synthetic peptide"
VIWYDGSNKYYADSVKG

SEQ ID NO: 576 - protein, 10 aa, Artificial Sequence
  source: /note="Description of Artificial Sequence: Synthetic peptide"
GSGNWGFFDY

SEQ ID NO: 577 - protein, 5 aa, Artificial Sequence
  source: /note="Description of Artificial Sequence: Synthetic peptide"
SYDMH

SEQ ID NO: 578 - protein, 6 aa, Artificial Sequence
  source: /note="Description of Artificial Sequence: Synthetic peptide"
WYDGSN

SEQ ID NO: 579 - protein, 8 aa, Artificial Sequence
  source: /note="Description of Artificial Sequence: Synthetic peptide"
GFTFSSYD

SEQ ID NO: 580 - protein, 8 aa, Artificial Sequence
  source: /note="Description of Artificial Sequence: Synthetic peptide"
IWYDGSNK

SEQ ID NO: 581 - protein, 12 aa, Artificial Sequence
  source: /note="Description of Artificial Sequence: Synthetic peptide"
ARGSGNWGFFDY

SEQ ID NO: 582 - protein, 118 aa, Artificial Sequence
  source: /note="Description of Artificial Sequence: Synthetic polypeptide"
QVQLVESGGGVVQPGRSLRLSCAASGFTFSSYDMHWVRQAPGGLEWVAVIWYDGSNKYYADSVKGRFTISRDNSKNTLYLQMNSLRAEDTAVYYCARGSGNWGFFDYWGQGTLVTVSS

SEQ ID NO: 583 - protein, 10 aa, Artificial Sequence
  source: /note="Description of Artificial Sequence: Synthetic peptide"
SASSSRSYMQ

SEQ ID NO: 584 - protein, 7 aa, Artificial Sequence
  source: /note="Description of Artificial Sequence: Synthetic peptide"
HQRSSYT

SEQ ID NO: 585 - protein, 6 aa, Artificial Sequence
  source: /note="Description of Artificial Sequence: Synthetic peptide"
SSSRSY

SEQ ID NO: 586 - protein, 4 aa, Artificial Sequence
  source: /note="Description of Artificial Sequence: Synthetic peptide"
RSSY

SEQ ID NO: 587 - protein, 5 aa, Artificial Sequence
  source: /note="Description of Artificial Sequence: Synthetic peptide"
SSRSY

SEQ ID NO: 588 - protein, 104 aa, Artificial Sequence [sequence omitted]

SEQ ID NO: 589 - protein, 10 aa, Artificial Sequence
  source: /note="Description of Artificial Sequence: Synthetic peptide"
GYSFTRYWMH

SEQ ID NO: 590 - protein, 17 aa, Artificial Sequence
  source: /note="Description of Artificial Sequence: Synthetic peptide"
AIYPGNSDTSYNQKFEG

SEQ ID NO: 591 - protein, 8 aa, Artificial Sequence
  source: /note="Description of Artificial Sequence: Synthetic peptide"
DYGYYFDF

SEQ ID NO: 592 - protein, 5 aa, Artificial Sequence
  source: /note="Description of Artificial Sequence: Synthetic peptide"
RYWMH

SEQ ID NO: 593 - protein, 7 aa, Artificial Sequence
  source: /note="Description of Artificial Sequence: Synthetic peptide"
GYSFTRY

SEQ ID NO: 594 - protein, 6 aa, Artificial Sequence
  source: /note="Description of Artificial Sequence: Synthetic peptide"
YPGNSD

SEQ ID NO: 595 - protein, 8 aa, Artificial Sequence
  source: /note="Description of Artificial Sequence: Synthetic peptide"
GYSFTRYW

SEQ ID NO: 596 - protein, 8 aa, Artificial Sequence
  source: /note="Description of Artificial Sequence: Synthetic peptide"
IYPGNSDT

SEQ ID NO: 597 - protein, 10 aa, Artificial Sequence
  source: /note="Description of Artificial Sequence: Synthetic peptide"
SRDYGYYFDF

SEQ ID NO: 598 - protein, 117 aa, Artificial Sequence
  source: /note="Description of Artificial Sequence: Synthetic polypeptide"
EVQLQQSGTVLARPGASVKMSCKASGYSFTRYWMHWIKQRPGQGLEWIGAIYPGNSDTSYNQKFEGKAKLTAVTSASTAYMELSSLTHEDSAVYYCSRDYGYYFDFWGQGTTLTVSS

SEQ ID NO: 599 - protein, 15 aa, Artificial Sequence
  source: /note="Description of Artificial Sequence: Synthetic peptide"
KASQSVDYDGDSYMN

SEQ ID NO: 600 - protein, 7 aa, Artificial Sequence
  source: /note="Description of Artificial Sequence: Synthetic peptide"
AASNLES

SEQ ID NO: 601 - protein, 9 aa, Artificial Sequence
  source: /note="Description of Artificial Sequence: Synthetic peptide"
QQSNEDPYT

SEQ ID NO: 602 - protein, 11 aa, Artificial Sequence
  source: /note="Description of Artificial Sequence: Synthetic peptide"
SQSVDYDGDSY

SEQ ID NO: 603 - protein, 6 aa, Artificial Sequence
  source: /note="Description of Artificial Sequence: Synthetic peptide"
SNEDPY

SEQ ID NO: 604 - protein, 10 aa, Artificial Sequence
  source: /note="Description of Artificial Sequence: Synthetic peptide"
QSVDYDGDSY

SEQ ID NO: 605 - protein, 111 aa, Artificial Sequence
  source: /note="Description of Artificial Sequence: Synthetic polypeptide"
DIVLTQSPLSLPVTLGQPASISCKASQSVDYDGDSYMNWYQQRPGQSPRLLIYAASNLESGVPDRFSGSGSGTDFTLKISRVEAEDVGVYYCQQSNEDPYTFGGGTKVEIK

SEQ ID NO: 606 - protein, 218 aa, Artificial Sequence
  source: /note="Description of Artificial Sequence: Synthetic polypeptide"
DIVLTQSPLSLPVTLGQPASISCKASQSVDYDGDSYMNWYQQRPGQSPRLLIYAASNLESGVPDRFSGSGSGTDFTLKISRVEAEDVGVYYCQQSNEDPYTFGGGTKVEIKRTVAAPSVFIFPPSDEQLKSGTASVVCLLNNFYPREAKVQWKVDNALQSGNSQESVTEQDSKDSTYSLSSTLTLSKADYEKHKVYACEVTHQGLSSPVTKSFNRGEC

SEQ ID NO: 607 - protein, 10 aa, Artificial Sequence
  source: /note="Description of Artificial Sequence: Synthetic peptide"
GYAFTNYLIE

SEQ ID NO: 608 - protein, 17 aa, Artificial Sequence
  source: /note="Description of Artificial Sequence: Synthetic peptide"
VINPGSGGTNYNEKFKG

SEQ ID NO: 609 - protein, 12 aa, Artificial Sequence
  source: /note="Description of Artificial Sequence: Synthetic peptide"
WRGDGYYAYFDV

SEQ ID NO: 610 - protein, 5 aa, Artificial Sequence
  source: /note="Description of Artificial Sequence: Synthetic peptide"
NYLIE

SEQ ID NO: 611 - protein, 7 aa, Artificial Sequence
  source: /note="Description of Artificial Sequence: Synthetic peptide"
GYAFTNY

SEQ ID NO: 612 - protein, 6 aa, Artificial Sequence
  source: /note="Description of Artificial Sequence: Synthetic peptide"
NPGSGG

SEQ ID NO: 613 - protein, 8 aa, Artificial Sequence
  source: /note="Description of Artificial Sequence: Synthetic peptide"
GYAFTNYL

SEQ ID NO: 614 - protein, 8 aa, Artificial Sequence
  source: /note="Description of Artificial Sequence: Synthetic peptide"
INPGSGGT

SEQ ID NO: 615 - protein, 14 aa, Artificial Sequence
  source: /note="Description of Artificial Sequence: Synthetic peptide"
ARWRGDGYYAYFDV

SEQ ID NO: 616 - protein, 121 aa, Artificial Sequence
  source: /note="Description of Artificial Sequence: Synthetic polypeptide"
EVQLVQSGAEVKKPGESLKISCKGSGYAFTNYLIEWVRQMPGKGLEWMGVINPGSGGTNYNEKFKGQVTISADKSISTAYLQWSSLKASDTAMYYCARWRGDGYYAYFDVWGQGTTVTVSS

SEQ ID NO: 617 - protein, 224 aa, Artificial Sequence
  source: /note="Description of Artificial Sequence: Synthetic polypeptide"
EVQLVQSGAEVKKPGESLKISCKGSGYAFTNYLIEWVRQMPGKGLEWMGVINPGSGGTNYNEKFKGQVTISADKSISTAYLQWSSLKASDTAMYYCARWRGDGYYAYFDVWGQGTTVTVSSASTKGPSVFPLAPSSKSTSGGTAALGCLVKDYFPEPVTVSWNSGALTSGVHTFPAVLQSSGLYSLSSVVTVPSSSLGTQTYICNVNHKPSNTKVDKRVEPKSC

SEQ ID NO: 618 - protein, 11 aa, Artificial Sequence
  source: /note="Description of Artificial Sequence: Synthetic peptide"
RASQSVSSYLA

SEQ ID NO: 619 - protein, 7 aa, Artificial Sequence
  source: /note="Description of Artificial Sequence: Synthetic peptide"
DASNRAT

SEQ ID NO: 620 - protein, 11 aa, Artificial Sequence
  source: /note="Description of Artificial Sequence: Synthetic peptide"
QQRSNWPPALT

SEQ ID NO: 621 - protein, 7 aa, Artificial Sequence
  source: /note="Description of Artificial Sequence: Synthetic peptide"
SQSVSSY

SEQ ID NO: 622 - protein, 3 aa, Artificial Sequence
  source: /note="Description of Artificial Sequence: Synthetic peptide"
DAS

SEQ ID NO: 623 - protein, 8 aa, Artificial Sequence
  source: /note="Description of Artificial Sequence: Synthetic peptide"
RSNWPPAL

SEQ ID NO: 624 - protein, 6 aa, Artificial Sequence
  source: /note="Description of Artificial Sequence: Synthetic peptide"
QSVSSY

SEQ ID NO: 625 - protein, 109 aa, Artificial Sequence
  source: /note="Description of Artificial Sequence: Synthetic polypeptide"
EIVLTQSPATLSLSPGERATLSCRASQSVSSYLAWYQQKPGQAPRLLIYDASNRATGIPARFSGSGSGTDFTLTISSLEPEDFAVYYCQQRSNWPPALTFCGGTKVEIK

SEQ ID NO: 626 - protein, 10 aa, Artificial Sequence
  source: /note="Description of Artificial Sequence: Synthetic peptide"
GGSFSGYYWS

SEQ ID NO: 627 - protein, 16 aa, Artificial Sequence
  source: /note="Description of Artificial Sequence: Synthetic peptide"
EINHGGYVTYNPSLES

SEQ ID NO: 628 - protein, 13 aa, Artificial Sequence
  source: /note="Description of Artificial Sequence: Synthetic peptide"
DYGPGNYDWYFDL

SEQ ID NO: 629 - protein, 5 aa, Artificial Sequence
  source: /note="Description of Artificial Sequence: Synthetic peptide"
GYYWS

SEQ ID NO: 630 - protein, 7 aa, Artificial Sequence
  source: /note="Description of Artificial Sequence: Synthetic peptide"
GGSFSGY

SEQ ID NO: 631 - protein, 5 aa, Artificial Sequence
  source: /note="Description of Artificial Sequence: Synthetic peptide"
NHGGY

SEQ ID NO: 632 - protein, 8 aa, Artificial Sequence
  source: /note="Description of Artificial Sequence: Synthetic peptide"
GGSFSGYY

SEQ ID NO: 633 - protein, 7 aa, Artificial Sequence
  source: /note="Description of Artificial Sequence: Synthetic peptide"
INHGGYV

SEQ ID NO: 634 - protein, 15 aa, Artificial Sequence
  source: /note="Description of Artificial Sequence: Synthetic peptide"
ARDYGPGNYDWYFDL

SEQ ID NO: 635 - protein, 121 aa, Artificial Sequence [sequence omitted]

SEQ ID NO: 636 - protein, 11 aa, Artificial Sequence
  source: /note="Description of Artificial Sequence: Synthetic peptide"
RASQDISSYLN

SEQ ID NO: 637 - protein, 7 aa, Artificial Sequence
  source: /note="Description of Artificial Sequence: Synthetic peptide"
YTSRLHS

SEQ ID NO: 638 - protein, 7 aa, Artificial Sequence
  source: /note="Description of Artificial Sequence: Synthetic peptide"
SQDISSY

SEQ ID NO: 639 - protein, 3 aa, Artificial Sequence
  source: /note="Description of Artificial Sequence: Synthetic peptide"
YTS

SEQ ID NO: 640 - protein, 6 aa, Artificial Sequence
  source: /note="Description of Artificial Sequence: Synthetic peptide"
GNTLPY

SEQ ID NO: 641 - protein, 6 aa, Artificial Sequence
  source: /note="Description of Artificial Sequence: Synthetic peptide"
QDISSY

SEQ ID NO: 642 - protein, 107 aa, Artificial Sequence [sequence omitted]

SEQ ID NO: 643 - protein, 11 aa, Artificial Sequence
  source: /note="Description of Artificial Sequence: Synthetic peptide"
GYSITSDHAWS

SEQ ID NO: 644 - protein, 16 aa, Artificial Sequence
  source: /note="Description of Artificial Sequence: Synthetic peptide"
YISYSGITTYNPSLKS

SEQ ID NO: 645 - protein, 10 aa, Artificial Sequence
  source: /note="Description of Artificial Sequence: Synthetic peptide"
SLARTTAMDY

SEQ ID NO: 646 - protein, 6 aa, Artificial Sequence
  source: /note="Description of Artificial Sequence: Synthetic peptide"
SDHAWS

SEQ ID NO: 647 - protein, 8 aa, Artificial Sequence
  source: /note="Description of Artificial Sequence: Synthetic peptide"
GYSITSDH

SEQ ID NO: 648 - protein, 5 aa, Artificial Sequence
  source: /note="Description of Artificial Sequence: Synthetic peptide"
SYSGI

SEQ ID NO: 649 - protein, 9 aa, Artificial Sequence
  source: /note="Description of Artificial Sequence: Synthetic peptide"
GYSITSDHA

SEQ ID NO: 650 - protein, 7 aa, Artificial Sequence
  source: /note="Description of Artificial Sequence: Synthetic peptide"
ISYSGIT

SEQ ID NO: 651 - protein, 12 aa, Artificial Sequence
  source: /note="Description of Artificial Sequence: Synthetic peptide"
ARSLARTTAMDY

SEQ ID NO: 652 - protein, 119 aa, Artificial Sequence [sequence omitted]

SEQ ID NO: 653 - protein, 10 aa, Artificial Sequence
  source: /note="Description of Artificial Sequence: Synthetic peptide"
QQSYSTPPIT

SEQ ID NO: 654 - protein, 7 aa, Artificial Sequence
  source: /note="Description of Artificial Sequence: Synthetic peptide"
SYSTPPI

SEQ ID NO: 655 - protein, 108 aa, Artificial Sequence
  source: /note="Description of Artificial Sequence: Synthetic polypeptide"
DIQMTQSPSSLSASVGDRVTITCRASQSISSYLNWYQQKPGKAPKLLIYAASSLQSGVPSRFSGSGSGTDFTLTISSLQPEDFATYYCQQSYSTPPITFGQGTRLEIK

SEQ ID NO: 656 - protein, 10 aa, Artificial Sequence
  source: /note="Description of Artificial Sequence: Synthetic peptide"
GFTFSDYYMT

SEQ ID NO: 657 - protein, 17 aa, Artificial Sequence
  source: /note="Description of Artificial Sequence: Synthetic peptide"
YISSSGTNKYNADSVKG

SEQ ID NO: 658 - protein, 8 aa, Artificial Sequence
  source: /note="Description of Artificial Sequence: Synthetic peptide"
DPPWGMDV

SEQ ID NO: 659 - protein, 5 aa, Artificial Sequence
  source: /note="Description of Artificial Sequence: Synthetic peptide"
DYYMT

SEQ ID NO: 660 - protein, 6 aa, Artificial Sequence
  source: /note="Description of Artificial Sequence: Synthetic peptide"
SSSGTN

SEQ ID NO: 661 - protein, 8 aa, Artificial Sequence
  source: /note="Description of Artificial Sequence: Synthetic peptide"
GFTFSDYY

SEQ ID NO: 662 - protein, 8 aa, Artificial Sequence
  source: /note="Description of Artificial Sequence: Synthetic peptide"
ISSSGTNK

SEQ ID NO: 663 - protein, 10 aa, Artificial Sequence
  source: /note="Description of Artificial Sequence: Synthetic peptide"
VRDPPWGMDV

SEQ ID NO: 664 - protein, 117 aa, Artificial Sequence
  source: /note="Description of Artificial Sequence: Synthetic polypeptide"
QVQLVESGGGLVKPGGSLRLSCAASGFTFSDYYMTWIRQTPGKGLDWVSYISSSGTNKYNADSVKGRFTISRDNAKNSLYLQMNSLRAEDTAVYYCVRDPPWGMDVWGQGTTVTVSS

SEQ ID NO: 665 - protein, 16 aa, Artificial Sequence
  source: /note="Description of Artificial Sequence: Synthetic peptide"
RSSQSLLHSSGNTYLN

SEQ ID NO: 666 - protein, 7 aa, Artificial Sequence
  source: /note="Description of Artificial Sequence: Synthetic peptide"
LVSKLES

SEQ ID NO: 667 - protein, 9 aa, Artificial Sequence
  source: /note="Description of Artificial Sequence: Synthetic peptide"
MQFTHYPYT

SEQ ID NO: 668 - protein, 12 aa, Artificial Sequence
  source: /note="Description of Artificial Sequence: Synthetic peptide"
SQSLLHSSGNTY

SEQ ID NO: 669 - protein, 3 aa, Artificial Sequence
  source: /note="Description of Artificial Sequence: Synthetic peptide"
LVS

SEQ ID NO: 670 - protein, 6 aa, Artificial Sequence
  source: /note="Description of Artificial Sequence: Synthetic peptide"
FTHYPY

SEQ ID NO: 671 - protein, 11 aa, Artificial Sequence
  source: /note="Description of Artificial Sequence: Synthetic peptide"
QSLLHSSGNTY

SEQ ID NO: 672 - protein, 112 aa, Artificial Sequence
  source: /note="Description of Artificial Sequence: Synthetic polypeptide"
DVVMTQSPPSLLVTLGQPASISCRSSQSLLHSSGNTYLNWLLQRPGQSPQPLIYLVSKLESGVPDRFSGSGSGTDFTLKISGVEAEDVGVYYCMQFTHYPYTFGQGTKLEIK

SEQ ID NO: 673 - protein, 219 aa, Artificial Sequence
  source: /note="Description of Artificial Sequence: Synthetic polypeptide"
DVVMTQSPPSLLVTLGQPASISCRSSQSLLHSSGNTYLNWLLQRPGQSPQPLIYLVSKLESGVPDRFSGSGSGTDFTLKISGVEAEDVGVYYCMQFTHYPYTFGQGTKLEIKRTVAAPSVFIFPPSDEQLKSGTASVVCLLNNFYPREAKVQWKVDNALQSGNSQESVTEQDSKDSTYSLSSTLTLSKADYEKHKVYACEVTHQGLSSPVTKSFNRGEC

SEQ ID NO: 674 - protein, 10 aa, Artificial Sequence
  source: /note="Description of Artificial Sequence: Synthetic peptide"
GYIFTEYYMY

SEQ ID NO: 675 - protein, 17 aa, Artificial Sequence
  source: /note="Description of Artificial Sequence: Synthetic peptide"
RIDPEDGSIDYVEKFKK

SEQ ID NO: 676 - protein, 9 aa, Artificial Sequence
  source: /note="Description of Artificial Sequence: Synthetic peptide"
GKFNYRFAY

SEQ ID NO: 677 - protein, 5 aa, Artificial Sequence
  source: /note="Description of Artificial Sequence: Synthetic peptide"
EYYMY

SEQ ID NO: 678 - protein, 7 aa, Artificial Sequence
  source: /note="Description of Artificial Sequence: Synthetic peptide"
GYIFTEY

SEQ ID NO: 679 - protein, 6 aa, Artificial Sequence
  source: /note="Description of Artificial Sequence: Synthetic peptide"
DPEDGS

SEQ ID NO: 680 - protein, 8 aa, Artificial Sequence
  source: /note="Description of Artificial Sequence: Synthetic peptide"
GYIFTEYY

SEQ ID NO: 681 - protein, 8 aa, Artificial Sequence
  source: /note="Description of Artificial Sequence: Synthetic peptide"
IDPEDGSI

SEQ ID NO: 682 - protein, 11 aa, Artificial Sequence
  source: /note="Description of Artificial Sequence: Synthetic peptide"
ARGKFNYRFAY

SEQ ID NO: 683 - protein, 118 aa, Artificial Sequence
  source: /note="Description of Artificial Sequence: Synthetic polypeptide"
QVQLVQSGAEVQRPGASVKVSCKASGYIFTEYYMYWVRQAPGQGLELVGRIDPEDGSIDYVEKFKKKVTLTADTSSSTAYMELSSLTSDDTAVYYCARGKFNYRFAYWGQGTLVTVSS

SEQ ID NO: 684 - protein, 221 aa, Artificial Sequence
  source: /note="Description of Artificial Sequence: Synthetic polypeptide"
QVQLVQSGAEVQRPGASVKVSCKASGYIFTEYYMYWVRQAPGQGLELVGRIDPEDGSIDYVEKFKKKVTLTADTSSSTAYMELSSLTSDDTAVYYCARGKFNYRFAYWGQGTLVTVSSASTKGPSVFPLAPSSKSTSGGTAALGCLVKDYFPEPVTVSWNSGALTSGVHTFPAVLQSSGLYSLSSVVTVPSSSLGTQTYICNVNHKPSNTKVDKKVEPKSC

SEQ ID NO: 685 - DNA, 1458 bp, Artificial Sequence
  source: /note="Description of Artificial Sequence: Synthetic polynucleotide"
atggccttaccagtgaccgccttgctcctgccgctggccttgctgctccacgccgccaggccggacatccagatgacacagactacatcctccctgtctgcctctctgggagacagagtcaccatcagttgcagggcaagtcaggacattagtaaatatttaaattggtatcagcagaaaccagatggaactgttaaactcctgatctaccatacatcaagattacactcaggagtcccatcaaggttcagtggcagtgggtctggaacagattattctctcaccattagcaacctggagcaagaagatattgccacttacttttgccaacagggtaatacgcttccgtacacgttcggaggggggaccaagctggagatcacaggtggcggtggctcgggcggtggtgggtcgggtggcggcggatctgaggtgaaactgcaggagtcaggacctggcctggtggcgccctcacagagcctgtccgtcacatgcactgtctcaggggtctcattacccgactatggtgtaagctggattcgccagcctccacgaaagggtctggagtggctgggagtaatatggggtagtgaaaccacatactataattcagctctcaaatccagactgaccatcatcaaggacaactccaagagccaagttttcttaaaaatgaacagtctgcaaactgatgacacagccatttactactgtgccaaacattattactacggtggtagctatgctatggactactggggccaaggaacctcagtcaccgtctcctcaaccacgacgccagcgccgcgaccaccaacaccggcgcccaccatcgcgtcgcagcccctgtccctgcgcccagaggcgtgccggccagcggcggggggcgcagtgcacacgagggggctggacttcgcctgtgatatctacatctgggcgcccttggccgggacttgtggggtccttctcctgtcactggttatcaccctttactgcaaacggggcagaaagaaactcctgtatatattcaaacaaccatttatgagaccagtacaaactactcaagaggaagatggctgtagctgccgatttccagaagaagaagaaggaggatgtgaactgagagtgaagttcagcaggagcgcagacgcccccgcgtacaagcagggccagaaccagctctataacgagctcaatctaggacgaagagaggagtacgatgttttggacaagagacgtggccgggaccctgagatggggggaaagccgagaaggaagaaccctcaggaaggcctgtacaatgaactgcagaaagataagatggcggaggcctacagtgagattgggatgaaaggcgagcgccggaggggcaaggggcacgatggcctttaccagggtctcagtacagccaccaaggacacctacgacgcccttcacatgcaggccctgccccctcgc

SEQ ID NO: 686 - protein, 242 aa, Artificial Sequence
  source: /note="Description of Artificial Sequence: Synthetic polypeptide"
DIQMTQTTSSLSASLGDRVTISCRASQDISKYLNWYQQKPDGTVKLLIYHTSRLHSGVPSRFSGSGSGTDYSLTISNLEQEDIATYFCQQGNTLPYTFGGGTKLEITGGGGSGGGGSGGGGSEVKLQESGPGLVAPSQSLSVTCTVSGVSLPDYGVSWIRQPPRKGLEWLGVIWGSETTYYNSALKSRLTIIKDNSKSQVFLKMNSLQTDDTAIYYCAKHYYYGGSYAMDYWGQGTSVTVSS

SEQ ID NO: 687 - protein, 16 aa, Artificial Sequence
  source: /note="Description of Artificial Sequence: Synthetic peptide"
VIWGSETTYYQSSLKS

SEQ ID NO: 688 - DNA, 813 bp, Artificial Sequence
  source: /note="Description of Artificial Sequence: Synthetic polynucleotide"
atggccctccctgtcaccgccctgctgcttccgctggctcttctgctccacgccgctcggcccgaaattgtgatgacccagtcacccgccactcttagcctttcacccggtgagcgcgcaaccctgtcttgcagagcctcccaagacatctcaaaataccttaattggtatcaacagaagcccggacaggctcctcgccttctgatctaccacaccagccggctccattctggaatccctgccaggttcagcggtagcggatctgggaccgactacaccctcactatcagctcactgcagccagaggacttcgctgtctatttctgtcagcaagggaacaccctgccctacacctttggacagggcaccaagctcgagattaaaggtggaggtggcagcggaggaggtgggtccggcggtggaggaagccaggtccaactccaagaaagcggaccgggtcttgtgaagccatcagaaactctttcactgacttgtactgtgagcggagtgtctctccccgattacggggtgtcttggatcagacagccaccggggaagggtctggaatggattggagtgatttggggctctgagactacttactaccaatcatccctcaagtcacgcgtcaccatctcaaaggacaactctaagaatcaggtgtcactgaaactgtcatctgtgaccgcagccgacaccgccgtgtactattgcgctaagcattactattatggcgggagctacgcaatggattactggggacagggtactctggtcaccgtgtccagccaccaccatcatcaccatcaccat

SEQ ID NO: 689 - protein, 486 aa, Artificial Sequence
  source: /note="Description of Artificial Sequence: Synthetic polypeptide"
MALPVTALLLPLALLLHAARPEIVMTQSPATLSLSPGERATLSCRASQDISKYLNWYQQKPGQAPRLLIYHTSRLHSGIPARFSGSGSGTDYTLTISSLQPEDFAVYFCQQGNTLPYTFGQGTKLEIKGGGGSGGGGSGGGGSQVQLQESGPGLVKPSETLSLTCTVSGVSLPDYGVSWIRQPPGKGLEWIGVIWGSETTYYQSSLKSRVTISKDNSKNQVSLKLSSVTAADTAVYYCAKHYYYGGSYAMDYWGQGTLVTVSSTTTPAPRPPTPAPTIASQPLSLRPEACRPAAGGAVHTRGLDFACDIYIWAPLAGTCGVLLLSLVITLYCKRGRKKLLYIFKQPFMRPVQTTQEEDGCSCRFPEEEEGGCELRVKFSRSADAPAYKQGQNQLYNELNLGRREEYDVLDKRRGRDPEMGGKPRRKNPQEGLYNELQKDKMAEAYSEIGMKGERRRGKGHDGLYQGLSTATKDTYDALHMQALPPR

SEQ ID NO: 690 - DNA, 1458 bp, Artificial Sequence
  source: /note="Description of Artificial Sequence: Synthetic polynucleotide"
atggccctccctgtcaccgccctgctgcttccgctggctcttctgctccacgccgctcggcccgaaattgtgatgacccagtcacccgccactcttagcctttcacccggtgagcgcgcaaccctgtcttgcagagcctcccaagacatctcaaaataccttaattggtatcaacagaagcccggacaggctcctcgccttctgatctaccacaccagccggctccattctggaatccctgccaggttcagcggtagcggatctgggaccgactacaccctcactatcagctcactgcagccagaggacttcgctgtctatttctgtcagcaagggaacaccctgccctacacctttggacagggcaccaagctcgagattaaaggtggaggtggcagcggaggaggtgggtccggcggtggaggaagccaggtccaactccaagaaagcggaccgggtcttgtgaagccatcagaaactctttcactgacttgtactgtgagcggagtgtctctccccgattacggggtgtcttggatcagacagccaccggggaagggtctggaatggattggagtgatttggggctctgagactacttactaccaatcatccctcaagtcacgcgtcaccatctcaaaggacaactctaagaatcaggtgtcactgaaactgtcatctgtgaccgcagccgacaccgccgtgtactattgcgctaagcattactattatggcgggagctacgcaatggattactggggacagggtactctggtcaccgtgtccagcaccactaccccagcaccgaggccacccaccccggctcctaccatcgcctcccagcctctgtccctgcgtccggaggcatgtagacccgcagctggtggggccgtgcatacccggggtcttgacttcgcctgcgatatctacatttgggcccctctggctggtacttgcggggtcctgctgctttcactcgtgatcactctttactgtaagcgcggtcggaagaagctgctgtacatctttaagcaacccttcatgaggcctgtgcagactactcaagaggaggacggctgttcatgccggttcccagaggaggaggaaggcggctgcgaactgcgcgtgaaattcagccgcagcgcagatgctccagcctacaagcaggggcagaaccagctctacaacgaactcaatcttggtcggagagaggagtacgacgtgctggacaagcggagaggacgggacccagaaatgggcgggaagccgcgcagaaagaatccccaagagggcctgtacaacgagctccaaaaggataagatggcagaagcctatagcgagattggtatgaaaggggaacgcagaagaggcaaaggccacgacggactgtaccagggactcagcaccgccaccaaggacacctatgacgctcttcacatgcaggccctgccgcctcgg

SEQ ID NO: 691 - protein, 30 aa, Artificial Sequence
  source: /note="Description of Artificial Sequence: Synthetic polypeptide"
  SITE (1)..(30): /note="This sequence may encompass 1-6 'Gly Gly Gly Gly Ser' repeating units"
  source: /note="See specification as filed for detailed description of substitutions and preferred embodiments"
GGGGSGGGGSGGGGSGGGGSGGGGSGGGGS

SEQ ID NO: 692 - protein, 4 aa, Artificial Sequence
  source: /note="Description of Artificial Sequence: Synthetic peptide"
RGDS

SEQ ID NO: 693-700 - skipped (8 entries)

SEQ ID NO: 701 - protein, 227 aa, Homo sapiens
DKTHTCPPCPAPELLGGPSVFLFPPKPKDTLMISRTPEVTCVVVDVSHEDPEVKFNWYVDGVEVHNAKTKPREEQYNSTYRVVSVLTVLHQDWLNGKEYKCKVSNKALPAPIEKTISKAKGQPREPQVYTLPPSREEMTKNQVSLTCLVKGFYPSDIAVEWESNGQPENNYKTTPPVLDSDGSFFLYSKLTVDKSRWQQGNVFSCSVMHEALHNHYTQKSLSLSPGK

SEQ ID NO: 702 - protein, 227 aa, Artificial Sequence
  source: /note="Description of Artificial Sequence: Synthetic polypeptide"
DKTHTCPPCPAPELLGGPSVFLFPPKPKDTLMISRTPEVTCVVVAVSHEDPEVKFNWYVDGVEVHNAKTKPREEQYASTYRVVSVLTVLHQDWLNGKEYKCKVSNKALAAPIEKTISKAKGQPREPQVYTLPPSREEMTKNQVSLTCLVKGFYPSDIAVEWESNGQPENNYKTTPPVLDSDGSFFLYSKLTVDKSRWQQGNVFSCSVMHEALHNHYTQKSLSLSPGK

SEQ ID NO: 703 - protein, 711 aa, Artificial Sequence
  source: /note="Description of Artificial Sequence: Synthetic polypeptide"
QVQLVQSGAEVQRPGASVKVSCKASGYIFTEYYMYWVRQAPGQGLELVGRIDPEDGSIDYVEKFKKKVTLTADTSSSTAYMELSSLTSDDTAVYYCARGKFNYRFAYWGQGTLVTVSSASTKGPSVFPLAPSSKSTSGGTAALGCLVKDYFPEPVTVSWNSGALTSGVHTFPAVLQSSGLYSLSSVVTVPSSSLGTQTYICNVNHKPSNTKVDKRVEPKSCDKTHTCPPCPAPELLGGPSVFLFPPKPKDTLMISRTPEVTCVVVAVSHEDPEVKFNWYVDGVEVHNAKTKPREEQYASTYRVVSVLTVLHQDWLNGKEYKCKVSNKALAAPIEKTISKAKGQPREPQVYTLPPSREEMTKNQVSLTCLVKGFYPSDIAVEWESNGQPENNYKTTPPVLDSDGSFFLYSKLTVDKSRWQQGNVFSCSVMHEALHNHYTQKSLSLSPGGGGSGGGGSGGGGSGGGGSQVQLVQSGGGVVQPGRSLRLSCKASGYTFTRYTMHWVRQAPGKGLEWIGYINPSRGYTNYNQKVKDRFTISRDNSKNTAFLQMDSLRPEDTGVYFCARYYDDHYSLDYWGQGTPVTVSSGGGGSGGGGSGGGGSGGGGSDIQMTQSPSSLSASVGDRVTITCSASSSVSYMNWYQQTPGKAPKRWIYDTSKLASGVPSRFSGSGSGTDYTFTISSLQPEDIATYYCQQWSSNPFTFGQGTKLQIT

SEQ ID NO: 704 - protein, 713 aa, Artificial Sequence
  source: /note="Description of Artificial Sequence: Synthetic polypeptide"
QVQLVQSGAEVKKPGASVKVSCKASGYTFTSYYIHWVRQAPGQGLEWIGCIYPGNVNTNYNEKFKDRATLTVDTSISTAYMELSRLRSDDTAVYFCTRSHYGLDWNFDVWGQGTTVTVSSASTKGPSVFPLAPSSKSTSGGTAALGCLVKDYFPEPVTVSWNSGALTSGVHTFPAVLQSSGLYSLSSVVTVPSSSLGTQTYICNVNHKPSNTKVDKRVEPKSCDKTHTCPPCPAPELLGGPSVFLFPPKPKDTLMISRTPEVTCVVVAVSHEDPEVKFNWYVDGVEVHNAKTKPREEQYASTYRVVSVLTVLHQDWLNGKEYKCKVSNKALAAPIEKTISKAKGQPREPQVYTLPPSREEMTKNQVSLTCLVKGFYPSDIAVEWESNGQPENNYKTTPPVLDSDGSFFLYSKLTVDKSRWQQGNVFSCSVMHEALHNHYTQKSLSLSPGGGGSGGGGSGGGGSGGGGSQVQLVQSGGGVVQPGRSLRLSCKASGYTFTRYTMHWVRQAPGKGLEWIGYINPSRGYTNYNQKVKDRFTISRDNSKNTAFLQMDSLRPEDTGVYFCARYYDDHYSLDYWGQGTPVTVSSGGGGSGGGGSGGGGSGGGGSDIQMTQSPSSLSASVGDRVTITCSASSSVSYMNWYQQTPGKAPKRWIYDTSKLASGVPSRFSGSGSGTDYTFTISSLQPEDIATYYCQQWSSNPFTFGQGTKLQIT

SEQ ID NO: 705 - protein, 226 aa, Artificial Sequence
  source: /note="Description of Artificial Sequence: Synthetic polypeptide"
DIVLTQPPSVSGAPGQRVTISCSGSSSNIVSNYVNWYQQLPGTAPKLLIYDNNKRPSGVPDRFSGSKSGTSASLAITGLQSEDEADYYCQSYAIGSYSVVFGGGTKLTVLGQGTKVEIKRTVAAPSVFIFPPSDEQLKSGTASVVCLLNNFYPREAKVQWKVDNALQSGNSQESVTEQDSKDSTYSLSSTLTLSKADYEKHKVYACEVTHQGLSSPVTKSFNRGEC

SEQ ID NO: 706 - protein, 713 aa, Artificial Sequence
  source: /note="Description of Artificial Sequence: Synthetic polypeptide"
QVQLVESGGGLVQPGGSLRLSCAASGFTFSTYGMSWVRQAPGKGLEWVSSIFYTGSSTYYADSVKGRFTISRDNSKNTLYLQMNSLRAEDTAVYYCARIGYAGDSKYAIWGQGTLVTVSSASTKGPSVFPLAPSSKSTSGGTAALGCLVKDYFPEPVTVSWNSGALTSGVHTFPAVLQSSGLYSLSSVVTVPSSSLGTQTYICNVNHKPSNTKVDKRVEPKSCDKTHTCPPCPAPELLGGPSVFLFPPKPKDTLMISRTPEVTCVVVAVSHEDPEVKFNWYVDGVEVHNAKTKPREEQYASTYRVVSVLTVLHQDWLNGKEYKCKVSNKALAAPIEKTISKAKGQPREPQVYTLPPSREEMTKNQVSLTCLVKGFYPSDIAVEWESNGQPENNYKTTPPVLDSDGSFFLYSKLTVDKSRWQQGNVFSCSVMHEALHNHYTQKSLSLSPGGGGSGGGGSGGGGSGGGGSQVQLVQSGGGVVQPGRSLRLSCKASGYTFTRYTMHWVRQAPGKGLEWIGYINPSRGYTNYNQKVKDRFTISRDNSKNTAFLQMDSLRPEDTGVYFCARYYDDHYSLDYWGQGTPVTVSSGGGGSGGGGSGGGGSGGGGSDIQMTQSPSSLSASVGDRVTITCSASSSVSYMNWYQQTPGKAPKRWIYDTSKLASGVPSRFSGSGSGTDYTFTISSLQPEDIATYYCQQWSSNPFTFGQGTKLQIT

SEQ ID NO: 707 - protein, 720 aa, Artificial Sequence
  source: /note="Description of Artificial Sequence: Synthetic polypeptide"
QVQLVQSGAEVQRPGASVKVSCKASGYIFTEYYMYWVRQAPGQGLELVGRIDPEDGSIDYVEKFKKKVTLTADTSSSTAYMELSSLTSDDTAVYYCARGKFNYRFAYWGQGTLVTVSSASTKGPSVFPLAPSSKSTSGGTAALGCLVKDYFPEPVTVSWNSGALTSGVHTFPAVLQSSGLYSLSSVVTVPSSSLGTQTYICNVNHKPSNTKVDKRVEPKSCDKTHTCPPCPAPELLGGPSVFLFPPKPKDTLMISRTPEVTCVVVAVSHEDPEVKFNWYVDGVEVHNAKTKPREEQYASTYRVVSVLTVLHQDWLNGKEYKCKVSNKALAAPIEKTISKAKGQPREPQVYTLPPSREEMTKNQVSLTCLVKGFYPSDIAVEWESNGQPENNYKTTPPVLDSDGSFFLYSKLTVDKSRWQQGNVFSCSVMHEALHNHYTQKSLSLSPGGGGSGGGGSGGGGSGGGGSEVQLVESGGGLVQPGGSLKLSCAASGFTFNKYAMNWVRQAPGKCLEWVARIRSKYNNYATYYADSVKDRFTISRDDSKNTAYLQMNNLKTEDTAVYYCVRHGNFGNSYISYWAYWGQGTLVTVSSGGGGSGGGGSGGGGSGGGGSQTVVTQEPSLTVSPGGTVTLTCGSSTGAVTSGNYPNWVQQKPGQAPRGLIGGTKFLAPGTPARFSGSLLGGKAALTLSGVQPEDEAEYYCVLWYSNRWVFGCGTKLTVL

SEQ ID NO: 708 - protein, 715 aa, Artificial Sequence
  source: /note="Description of Artificial Sequence: Synthetic polypeptide"
QVQLVQSGAEVQRPGASVKVSCKASGYIFTEYYMYWVRQAPGQGLELVGRIDPEDGSIDYVEKFKKKVTLTADTSSSTAYMELSSLTSDDTAVYYCARGKFNYRFAYWGQGTLVTVSSASTKGPSVFPLAPSSKSTSGGTAALGCLVKDYFPEPVTVSWNSGALTSGVHTFPAVLQSSGLYSLSSVVTVPSSSLGTQTYICNVNHKPSNTKVDKRVEPKSCDKTHTCPPCPAPELLGGPSVFLFPPKPKDTLMISRTPEVTCVVVAVSHEDPEVKFNWYVDGVEVHNAKTKPREEQYASTYRVVSVLTVLHQDWLNGKEYKCKVSNKALAAPIEKTISKAKGQPREPQVYTLPPSREEMTKNQVSLTCLVKGFYPSDIAVEWESNGQPENNYKTTPPVLDSDGSFFLYSKLTVDKSRWQQGNVFSCSVMHEALHNHYTQKSLSLSPGGGGSGGGGSGGGGSGGGGSEVQLVESGGGLVQPGGSLKLSCAASGFTFNTYAMNWVRQASGKCLEWVGRIRSKYNNYATYYADSVKDRFTISRDDSKSTLYLQMNSLKTEDTAVYYCVRHGNFGNSYVSWFAYWGQGTLVTVSSGGGGSGGGGSGGGGSQAVVTQEPSLTVSPGGTVTLTCRSSTGAVTTSNYANWVQQKPGQAPRGLIGGTNKRAPWTPARFSGSLLGDKAALTLSGAQPEDEAEYFCALWYSNLWVFGCGTKLTVL

SEQ ID NO: 709 - protein, 722 aa, Artificial Sequence
  source: /note="Description of Artificial Sequence: Synthetic polypeptide"
QVQLVQSGAEVKKPGASVKVSCKASGYTFTSYYIHWVRQAPGQGLEWIGCIYPGNVNTNYNEKFKDRATLTVDTSISTAYMELSRLRSDDTAVYFCTRSHYGLDWNFDVWGQGTTVTVSSASTKGPSVFPLAPSSKSTSGGTAALGCLVKDYFPEPVTVSWNSGALTSGVHTFPAVLQSSGLYSLSSVVTVPSSSLGTQTYICNVNHKPSNTKVDKRVEPKSCDKTHTCPPCPAPELLGGPSVFLFPPKPKDTLMISRTPEVTCVVVAVSHEDPEVKFNWYVDGVEVHNAKTKPREEQYASTYRVVSVLTVLHQDWLNGKEYKCKVSNKALAAPIEKTISKAKGQPREPQVYTLPPSREEMTKNQVSLTCLVKGFYPSDIAVEWESNGQPENNYKTTPPVLDSDGSFFLYSKLTVDKSRWQQGNVFSCSVMHEALHNHYTQKSLSLSPGGGGSGGGGSGGGGSGGGGSEVQLVESGGGLVQPGGSLKLSCAASGFTFNKYAMNWVRQAPGKCLEWVARIRSKYNNYATYYADSVKDRFTISRDDSKNTAYLQMNNLKTEDTAVYYCVRHGNFGNSYISYWAYWGQGTLVTVSSGGGGSGGGGSGGGGSGGGGSQTVVTQEPSLTVSPGGTVTLTCGSSTGAVTSGNYPNWVQQKPGQAPRGLIGGTKFLAPGTPARFSGSLLGGKAALTLSGVQPEDEAEYYCVLWYSNRWVFGCGTKLTVL

SEQ ID NO: 710 - protein, 717 aa, Artificial Sequence
  source: /note="Description of Artificial Sequence: Synthetic polypeptide"
QVQLVQSGAEVKKPGASVKVSCKASGYTFTSYYIHWVRQAPGQGLEWIGCIYPGNVNTNYNEKFKDRATLTVDTSISTAYMELSRLRSDDTAVYFCTRSHYGLDWNFDVWGQGTTVTVSSASTKGPSVFPLAPSSKSTSGGTAALGCLVKDYFPEPVTVSWNSGALTSGVHTFPAVLQSSGLYSLSSVVTVPSSSLGTQTYICNVNHKPSNTKVDKRVEPKSCDKTHTCPPCPAPELLGGPSVFLFPPKPKDTLMISRTPEVTCVVVAVSHEDPEVKFNWYVDGVEVHNAKTKPREEQYASTYRVVSVLTVLHQDWLNGKEYKCKVSNKALAAPIEKTISKAKGQPREPQVYTLPPSREEMTKNQVSLTCLVKGFYPSDIAVEWESNGQPENNYKTTPPVLDSDGSFFLYSKLTVDKSRWQQGNVFSCSVMHEALHNHYTQKSLSLSPGGGGSGGGGSGGGGSGGGGSEVQLVESGGGLVQPGGSLKLSCAASGFTFNTYAMNWVRQASGKCLEWVGRIRSKYNNYATYYADSVKDRFTISRDDSKSTLYLQMNSLKTEDTAVYYCVRHGNFGNSYVSWFAYWGQGTLVTVSSGGGGSGGGGSGGGGSQAVVTQEPSLTVSPGGTVTLTCRSSTGAVTTSNYANWVQQKPGQAPRGLIGGTNKRAPWTPARFSGSLLGDKAALTLSGAQPEDEAEYFCALWYSNLWVFGCGTKLTVL

SEQ ID NO: 711 - protein, 713 aa, Artificial Sequence
  source: /note="Description of Artificial Sequence: Synthetic polypeptide"
QVQLVQSGGGVVQPGRSLRLSCKASGYTFTRYTMHWVRQAPGKGLEWIGYINPSRGYTNYNQKVKDRFTISRDNSKNTAFLQMDSLRPEDTGVYFCARYYDDHYSLDYWGQGTPVTVSSGGGGSGGGGSGGGGSGGGGSDIQMTQSPSSLSASVGDRVTITCSASSSVSYMNWYQQTPGKAPKRWIYDTSKLASGVPSRFSGSGSGTDYTFTISSLQPEDIATYYCQQWSSNPFTFGQGTKLQITGGGGSGGGGSGGGGSGGGGSQVQLVQSGAEVQRPGASVKVSCKASGYIFTEYYMYWVRQAPGQGLELVGRIDPEDGSIDYVEKFKKKVTLTADTSSSTAYMELSSLTSDDTAVYYCARGKFNYRFAYWGQGTLVTVSSASTKGPSVFPLAPSSKSTSGGTAALGCLVKDYFPEPVTVSWNSGALTSGVHTFPAVLQSSGLYSLSSVVTVPSSSLGTQTYICNVNHKPSNTKVDKRVEPKSCDKTHTCPPCPAPELLGGPSVFLFPPKPKDTLMISRTPEVTCVVVDVSHEDPEVKFNWYVDGVEVHNAKTKPREEQYNSTYRVVSVLTVLHQDWLNGKEYKCKVSNKALPAPIEKTISKAKGQPREPQVYTLPPSREEMTKNQVSLTCLVKGFYPSDIAVEWESNGQPENNYKTTPPVLDSDGSFFLYSKLTVDKSRWQQGNVFSCSVMHEALHNHYTQKSLSLSPGK

SEQ ID NO: 712 - protein, 715 aa, Artificial Sequence
  source: /note="Description of Artificial Sequence: Synthetic polypeptide"
QVQLVQSGGGVVQPGRSLRLSCKASGYTFTRYTMHWVRQAPGKGLEWIGYINPSRGYTNYNQKVKDRFTISRDNSKNTAFLQMDSLRPEDTGVYFCARYYDDHYSLDYWGQGTPVTVSSGGGGSGGGGSGGGGSGGGGSDIQMTQSPSSLSASVGDRVTITCSASSSVSYMNWYQQTPGKAPKRWIYDTSKLASGVPSRFSGSGSGTDYTFTISSLQPEDIATYYCQQWSSNPFTFGQGTKLQITGGGGSGGGGSGGGGSGGGGSQVQLVQSGAEVKKPGASVKVSCKASGYTFTSYYIHWVRQAPGQGLEWIGCIYPGNVNTNYNEKFKDRATLTVDTSISTAYMELSRLRSDDTAVYFCTRSHYGLDWNFDVWGQGTTVTVSSASTKGPSVFPLAPSSKSTSGGTAALGCLVKDYFPEPVTVSWNSGALTSGVHTFPAVLQSSGLYSLSSVVTVPSSSLGTQTYICNVNHKPSNTKVDKRVEPKSCDKTHTCPPCPAPELLGGPSVFLFPPKPKDTLMISRTPEVTCVVVDVSHEDPEVKFNWYVDGVEVHNAKTKPREEQYNSTYRVVSVLTVLHQDWLNGKEYKCKVSNKALPAPIEKTISKAKGQPREPQVYTLPPSREEMTKNQVSLTCLVKGFYPSDIAVEWESNGQPENNYKTTPPVLDSDGSFFLYSKLTVDKSRWQQGNVFSCSVMHEALHNHYTQKSLSLSPGK

SEQ ID NO: 713 - protein, 711 aa, Artificial Sequence
  source: /note="Description of Artificial Sequence: Synthetic polypeptide"
QVQLVQSGAEVQRPGASVKVSCKASGYIFTEYYMYWVRQAPGQGLELVGRIDPEDGSIDYVEKFKKKVTLTADTSSSTAYMELSSLTSDDTAVYYCARGKFNYRFAYWGQGTLVTVSSASTKGPSVFPLAPSSKSTSGGTAALGCLVKDYFPEPVTVSWNSGALTSGVHTFPAVLQSSGLYSLSSVVTVPSSSLGTQTYICNVNHKPSNTKVDKRVEPKSCDKTHTCPPCPAPELLGGPSVFLFPPKPKDTLMISRTPEVTCVVVDVSHEDPEVKFNWYVDGVEVHNAKTKPREEQYNSTYRVVSVLTVLHQDWLNGKEYKCKVSNKALPAPIEKTISKAKGQPREPQVYTLPPSREEMTKNQVSLTCLVKGFYPSDIAVEWESNGQPENNYKTTPPVLDSDGSFFLYSKLTVDKSRWQQGNVFSCSVMHEALHNHYTQKSLSLSPGGGGSGGGGSGGGGSGGGGSQVQLVQSGGGVVQPGRSLRLSCKASGYTFTRYTMHWVRQAPGKGLEWIGYINPSRGYTNYNQKVKDRFTISRDNSKNTAFLQMDSLRPEDTGVYFCARYYDDHYSLDYWGQGTPVTVSSGGGGSGGGGSGGGGSGGGGSDIQMTQSPSSLSASVGDRVTITCSASSSVSYMNWYQQTPGKAPKRWIYDTSKLASGVPSRFSGSGSGTDYTFTISSLQPEDIATYYCQQWSSNPFTFGQGTKLQIT

SEQ ID NO: 714 - protein, 713 aa, Artificial Sequence
  source: /note="Description of Artificial Sequence: Synthetic polypeptide"
QVQLVQSGAEVKKPGASVKVSCKASGYTFTSYYIHWVRQAPGQGLEWIGCIYPGNVNTNYNEKFKDRATLTVDTSISTAYMELSRLRSDDTAVYFCTRSHYGLDWNFDVWGQGTTVTVSSASTKGPSVFPLAPSSKSTSGGTAALGCLVKDYFPEPVTVSWNSGALTSGVHTFPAVLQSSGLYSLSSVVTVPSSSLGTQTYICNVNHKPSNTKVDKRVEPKSCDKTHTCPPCPAPELLGGPSVFLFPPKPKDTLMISRTPEVTCVVVDVSHEDPEVKFNWYVDGVEVHNAKTKPREEQYNSTYRVVSVLTVLHQDWLNGKEYKCKVSNKALPAPIEKTISKAKGQPREPQVYTLPPSREEMTKNQVSLTCLVKGFYPSDIAVEWESNGQPENNYKTTPPVLDSDGSFFLYSKLTVDKSRWQQGNVFSCSVMHEALHNHYTQKSLSLSPGGGGSGGGGSGGGGSGGGGSQVQLVQSGGGVVQPGRSLRLSCKASGYTFTRYTMHWVRQAPGKGLEWIGYINPSRGYTNYNQKVKDRFTISRDNSKNTAFLQMDSLRPEDTGVYFCARYYDDHYSLDYWGQGTPVTVSSGGGGSGGGGSGGGGSGGGGSDIQMTQSPSSLSASVGDRVTITCSASSSVSYMNWYQQTPGKAPKRWIYDTSKLASGVPSRFSGSGSGTDYTFTISSLQPEDIATYYCQQWSSNPFTFGQGTKLQIT

SEQ ID NO: 715 - protein, 723 aa, Artificial Sequence
  source: /note="Description of Artificial Sequence: Synthetic polypeptide"
QVQLVQSGAEVQRPGASVKVSCKASGYIFTEYYMYWVRQAPGQGLELVGRIDPEDGSIDYVEKFKKKVTLTADTSSSTAYMELSSLTSDDTAVYYCARGKFNYRFAYWGQGTLVTVSSASTKGPSVFPLAPSSKSTSGGTAALGCLVKDYFPEPVTVSWNSGALTSGVHTFPAVLQSSGLYSLSSVVTVPSSSLGTQTYICNVNHKPSNTKVDKRVEPKSCGGGGSGGGGSQVQLVQSGGGVVQPGRSLRLSCKASGYTFTRYTMHWVRQAPGKGLEWIGYINPSRGYTNYNQKVKDRFTISRDNSKNTAFLQMDSLRPEDTGVYFCARYYDDHYSLDYWGQGTPVTVSSGGGGSGGGGSGGGGSGGGGSDIQMTQSPSSLSASVGDRVTITCSASSSVSYMNWYQQTPGKAPKRWIYDTSKLASGVPSRFSGSGSGTDYTFTISSLQPEDIATYYCQQWSSNPFTFGQGTKLQITGGGGSGGGGSGGGGSGGGGSDKTHTCPPCPAPELLGGPSVFLFPPKPKDTLMISRTPEVTCVVVDVSHEDPEVKFNWYVDGVEVHNAKTKPREEQYNSTYRVVSVLTVLHQDWLNGKEYKCKVSNKALPAPIEKTISKAKGQPREPQVYTLPPSREEMTKNQVSLTCLVKGFYPSDIAVEWESNGQPENNYKTTPPVLDSDGSFFLYSKLTVDKSRWQQGNVFSCSVMHEALHNHYTQKSLSLSPGK

SEQ ID NO: 716 - protein, 725 aa, Artificial Sequence
  source: /note="Description of Artificial Sequence: Synthetic polypeptide"
QVQLVQSGAEVKKPGASVKVSCKASGYTFTSYYIHWVRQAPGQGLEWIGCIYPGNVNTNYNEKFKDRATLTVDTSISTAYMELSRLRSDDTAVYFCTRSHYGLDWNFDVWGQGTTVTVSSASTKGPSVFPLAPSSKSTSGGTAALGCLVKDYFPEPVTVSWNSGALTSGVHTFPAVLQSSGLYSLSSVVTVPSSSLGTQTYICNVNHKPSNTKVDKRVEPKSCGGGGSGGGGSQVQLVQSGGGVVQPGRSLRLSCKASGYTFTRYTMHWVRQAPGKGLEWIGYINPSRGYTNYNQKVKDRFTISRDNSKNTAFLQMDSLRPEDTGVYFCARYYDDHYSLDYWGQGTPVTVSSGGGGSGGGGSGGGGSGGGGSDIQMTQSPSSLSASVGDRVTITCSASSSVSYMNWYQQTPGKAPKRWIYDTSKLASGVPSRFSGSGSGTDYTFTISSLQPEDIATYYCQQWSSNPFTFGQGTKLQITGGGGSGGGGSGGGGSGGGGSDKTHTCPPCPAPELLGGPSVFLFPPKPKDTLMISRTPEVTCVVVDVSHEDPEVKFNWYVDGVEVHNAKTKPREEQYNSTYRVVSVLTVLHQDWLNGKEYKCKVSNKALPAPIEKTISKAKGQPREPQVYTLPPSREEMTKNQVSLTCLVKGFYPSDIAVEWESNGQPENNYKTTPPVLDSDGSFFLYSKLTVDKSRWQQGNVFSCSVMHEALHNHYTQKSLSLSPGK

SEQ ID NO: 717 - protein, 716 aa, Artificial Sequence
  source: /note="Description of Artificial Sequence: Synthetic polypeptide"
QVQLVQSGGGVVQPGRSLRLSCKASGYTFTRYTMHWVRQAPGKGLEWIGYINPSRGYTNYNQKVKDRFTISRDNSKNTAFLQMDSLRPEDTGVYFCARYYDDHYSLDYWGQGTPVTVSSGGGGSGGGGSGGGGSGGGGSDIQMTQSPSSLSASVGDRVTITCSASSSVSYMNWYQQTPGKAPKRWIYDTSKLASGVPSRFSGSGSGTDYTFTISSLQPEDIATYYCQQWSSNPFTFGQGTKLQITGGGGSDKTHTCPPCPAPELLGGPSVFLFPPKPKDTLMISRTPEVTCVVVDVSHEDPEVKFNWYVDGVEVHNAKTKPREEQYNSTYRVVSVLTVLHQDWLNGKEYKCKVSNKALPAPIEKTISKAKGQPREPQVYTLPPSREEMTKNQVSLTCLVKGFYPSDIAVEWESNGQPENNYKTTPPVLDSDGSFFLYSKLTVDKSRWQQGNVFSCSVMHEALHNHYTQKSLSLSPGGGGSGGGGSGGGGSGGGGSQVQLVQSGAEVQRPGASVKVSCKASGYIFTEYYMYWVRQAPGQGLELVGRIDPEDGSIDYVEKFKKKVTLTADTSSSTAYMELSSLTSDDTAVYYCARGKFNYRFAYWGQGTLVTVSSASTKGPSVFPLAPSSKSTSGGTAALGCLVKDYFPEPVTVSWNSGALTSGVHTFPAVLQSSGLYSLSSVVTVPSSSLGTQTYICNVNHKPSNTKVDKRVEPKSC

SEQ ID NO: 718 - protein, 718 aa, Artificial Sequence
  source: /note="Description of Artificial Sequence: Synthetic polypeptide"
QVQLVQSGGGVVQPGRSLRLSCKASGYTFTRYTMHWVRQAPGKGLEWIGYINPSRGYTNYNQKVKDRFTISRDNSKNTAFLQMDSLRPEDTGVYFCARYYDDHYSLDYWGQGTPVTVSSGGGGSGGGGSGGGGSGGGGSDIQMTQSPSSLSASVGDRVTITCSASSSVSYMNWYQQTPGKAPKRWIYDTSKLASGVPSRFSGSGSGTDYTFTISSLQPEDIATYYCQQWSSNPFTFGQGTKLQITGGGGSDKTHTCPPCPAPELLGGPSVFLFPPKPKDTLMISRTPEVTCVVVDVSHEDPEVKFNWYVDGVEVHNAKTKPREEQYNSTYRVVSVLTVLHQDWLNGKEYKCKVSNKALPAPIEKTISKAKGQPREPQVYTLPPSREEMTKNQVSLTCLVKGFYPSDIAVEWESNGQPENNYKTTPPVLDSDGSFFLYSKLTVDKSRWQQGNVFSCSVMHEALHNHYTQKSLSLSPGGGGSGGGGSGGGGSGGGGSQVQLVQSGAEVKKPGASVKVSCKASGYTFTSYYIHWVRQAPGQGLEWIGCIYPGNVNTNYNEKFKDRATLTVDTSISTAYMELSRLRSDDTAVYFCTRSHYGLDWNFDVWGQGTTVTVSSASTKGPSVFPLAPSSKSTSGGTAALGCLVKDYFPEPVTVSWNSGALTSGVHTFPAVLQSSGLYSLSSVVTVPSSSLGTQTYICNVNHKPSNTKVDKRVEPKSC

SEQ ID NO: 719 - protein, 448 aa, Artificial Sequence
  source: /note="Description of Artificial Sequence: Synthetic polypeptide"
QVQLVQSGAEVQRPGASVKVSCKASGYIFTEYYMYWVRQAPGQGLELVGRIDPEDGSIDYVEKFKKKVTLTADTSSSTAYMELSSLTSDDTAVYYCARGKFNYRFAYWGQGTLVTVSSASTKGPSVFPLAPSSKSTSGGTAALGCLVKDYFPEPVTVSWNSGALTSGVHTFPAVLQSSGLYSLSSVVTVPSSSLGTQTYICNVNHKPSNTKVDKRVEPKSCDKTHTCPPCPAPELLGGPSVFLFPPKPKDTLMISRTPEVTCVVVDVSHEDPEVKFNWYVDGVEVHNAKTKPREEQYNSTYRVVSVLTVLHQDWLNGKEYKCKVSNKALPAPIEKTISKAKGQPREPQVCTLPPSREEMTKNQVSLSCAVKGFYPSDIAVEWESNGQPENNYKTTPPVLDSDGSFFLVSKLTVDKSRWQQGNVFSCSVMHEALHNRFTQKSLSLSPGK

SEQ ID NO: 720 - protein, 477 aa, Artificial Sequence
  source: /note="Description of Artificial Sequence: Synthetic polypeptide"
QVQLVQSGGGVVQPGRSLRLSCKASGYTFTRYTMHWVRQAPGKGLEWIGYINPSRGYTNYNQKVKDRFTISRDNSKNTAFLQMDSLRPEDTGVYFCARYYDDHYSLDYWGQGTPVTVSSGGGGSGGGGSGGGGSGGGGSDIQMTQSPSSLSASVGDRVTITCSASSSVSYMNWYQQTPGKAPKRWIYDTSKLASGVPSRFSGSGSGTDYTFTISSLQPEDIATYYCQQWSSNPFTFGQGTKLQITGGGGSDKTHTCPPCPAPELLGGPSVFLFPPKPKDTLMISRTPEVTCVVVDVSHEDPEVKFNWYVDGVEVHNAKTKPREEQYNSTYRVVSVLTVLHQDWLNGKEYKCKVSNKALPAPIEKTISKAKGQPREPQVYTLPPCREEMTKNQVSLWCLVKGFYPSDIAVEWESNGQPENNYKTTPPVLDSDGSFFLYSKLTVDKSRWQQGNVFSCSVMHEALHNHYTQKSLSLSPGK

SEQ ID NO: 721 - protein, 450 aa, Artificial Sequence
  source: /note="Description of Artificial Sequence: Synthetic polypeptide"
QVQLVQSGAEVKKPGASVKVSCKASGYTFTSYYIHWVRQAPGQGLEWIGCIYPGNVNTNYNEKFKDRATLTVDTSISTAYMELSRLRSDDTAVYFCTRSHYGLDWNFDVWGQGTTVTVSSASTKGPSVFPLAPSSKSTSGGTAALGCLVKDYFPEPVTVSWNSGALTSGVHTFPAVLQSSGLYSLSSVVTVPSSSLGTQTYICNVNHKPSNTKVDKRVEPKSCDKTHTCPPCPAPELLGGPSVFLFPPKPKDTLMISRTPEVTCVVVDVSHEDPEVKFNWYVDGVEVHNAKTKPREEQYNSTYRVVSVLTVLHQDWLNGKEYKCKVSNKALPAPIEKTISKAKGQPREPQVCTLPPSREEMTKNQVSLSCAVKGFYPSDIAVEWESNGQPENNYKTTPPVLDSDGSFFLVSKLTVDKSRWQQGNVFSCSVMHEALHNRFTQKSLSLSPGK

SEQ ID NO: 722 - protein, 227 aa, Artificial Sequence
  source: /note="Description of Artificial Sequence: Synthetic polypeptide"
DKTHTCPPCPAPELLGGPSVFLFPPKPKDTLMISRTPEVTCVVVDVSHEDPEVKFNWYVDGVEVHNAKTKPREEQYNSTYRVVSVLTVLHQDWLNGKEYKCKVSNKALPAPIEKTISKAKGQPREPQVCTLPPSREEMTKNQVSLSCAVKGFYPSDIAVEWESNGQPENNYKTTPPVLDSDGSFFLVSKLTVDKSRWQQGNVFSCSVMHEALHNRFTQKSLSLSPGK

SEQ ID NO: 723 - protein, 534 aa, Artificial Sequence
  source: /note="Description of Artificial Sequence: Synthetic polypeptide"
QVQLVQSGGGVVQPGRSLRLSCKASGYTFTRYTMHWVRQAPGKGLEWIGYINPSRGYTNYNQKVKDRFTISRDNSKNTAFLQMDSLRPEDTGVYFCARYYDDHYSLDYWGQGTPVTVSSGGGGSGGGGSGGGGSGGGGSDIQMTQSPSSLSASVGDRVTITCSASSSVSYMNWYQQTPGKAPKRWIYDTSKLASGVPSRFSGSGSGTDYTFTISSLQPEDIATYYCQQWSSNPFTFGQGTKLQITGGGGSDKTHTCPPCPAPELLGGPSVFLFPPKPKDTLMISRTPEVTCVVVDVSHEDPEVKFNWYVDGVEVHNAKTKPREEQYNSTYRVVSVLTVLHQDWLNGKEYKCKVSNKALPAPIEKTISKAKGQPREPQVYTLPPCREEMTKNQVSLWCLVKGFYPSDIAVEWESNGQPENNYKTTPPVLDSDGSFFLYSKLTVDKSRWQQGNVFSCSVMHEALHNHYTQKSLSLSPGGGGGSGGGGSGGGGSEEDPCACESLVKFQAKVEGLLQALTRKLEAVSKRLAILENTVV

SEQ ID NO: 724 - protein, 529 aa, Artificial Sequence
  source: /note="Description of Artificial Sequence: Synthetic polypeptide"
QVQLVQSGGGVVQPGRSLRLSCKASGYTFTRYTMHWVRQAPGKGLEWIGYINPSRGYTNYNQKVKDRFTISRDNSKNTAFLQMDSLRPEDTGVYFCARYYDDHYSLDYWGQGTPVTVSSGGGGSGGGGSGGGGSGGGGSDIQMTQSPSSLSASVGDRVTITCSASSSVSYMNWYQQTPGKAPKRWIYDTSKLASGVPSRFSGSGSGTDYTFTISSLQPEDIATYYCQQWSSNPFTFGQGTKLQITGGGGSDKTHTCPPCPAPELLGGPSVFLFPPKPKDTLMISRTPEVTCVVVDVSHEDPEVKFNWYVDGVEVHNAKTKPREEQYNSTYRVVSVLTVLHQDWLNGKEYKCKVSNKALPAPIEKTISKAKGQPREPQVYTLPPCREEMTKNQVSLWCLVKGFYPSDIAVEWESNGQPENNYKTTPPVLDSDGSFFLYSKLTVDKSRWQQGNVFSCSVMHEALHNHYTQKSLSLSPGGGGGSDLGPQMLRELQETNAALQDVRELLRQQVREITFLKNTVMECDACGMQQ

SEQ ID NO: 725 - protein, 419 aa, Homo sapiens
MHLLGFFSVACSLLAAALLPGPREAPAAAAAFESGLDLSDAEPDAGEATAYASKDLEEQLRSVSSVDELMTVLYPEYWKMYKCQLRKGGWQHNREQANLNSRTEETIKFAAAHYNTEILKSIDNEWRKTQCMPREVCIDVGKEFGVATNTFFKPPCVSVYRCGGCCNSEGLQCMNTSTSYLSKTLFEITVPLSQGPKPVTISFANHTSCRCMSKLDVYRQVHSIIRRSLPATLPQCQAANKTCPTNYMWNNHICRCLAQEDFMFSSDAGDDSTDGFHDICGPNKELDEETCQCVCRAGLRPASCGPHKELDRNSCQCVCKNKLFPSQCGANREFDENTCQCVCKRTCPRNQPLNPGKCACECTESPQKCLLKGKKFHHQTCSCYRRPCTNRQKACEPGFSYSEEVCRCVPSYWKRPQMS

SEQ ID NO: 726 - protein, 719 aa, Artificial Sequence
  source: /note="Description of Artificial Sequence: Synthetic polypeptide"
QVQLVESGGGLVQPGGSLRLSCAASGFTFSTYGMSWVRQAPGKGLEWVSSIFYTGSSTYYADSVKGRFTISRDNSKNTLYLQMNSLRAEDTAVYYCARIGYAGDSKYAIWGQGTLVTVSSASTKGPSVFPLAPSSKSTSGGTAALGCLVKDYFPEPVTVSWNSGALTSGVHTFPAVLQSSGLYSLSSVVTVPSSSLGTQTYICNVNHKPSNTKVDKRVEPKSCDKTHTCPPCPAPEAAGGPSVFLFPPKPKDTLMISRTPEVTCVVVDVKHEDPEVKFNWYVDGVEVHNAKTKPREEQYNSTYRVVSVLTVLHQDWLNGKEYKCKVSNKALAAPIEKTISKAKGQPREPQVYTLPPSREEMTKNQVSLTCLVKGFYPSDIAVEWESNGQPENNYKTTPPVLDSDGSFFLYSKLTVDKSRWQQGNVFSCSVMHEALHNHYTQKSLSLSPGGGGGSGGGGSGGGGSGGGGSEVKLVESGGDLVQPGDSLTLSCVASGFTFSKQGMHWIRQAPKKGLEWIAMIYYDSSKMYYADTVKGRFTISRDNSKNTLYLEMNSLRSEDTAMYYCASFWWDLDFDHWGQGVMVTVSSGGGGSGGGGSGGGGSGGGGSDILVTQTPVSLPVSLGGHVSISCRSSQSLVRSEGTTYFNWYLQKPGQSPQLLIYRVSNRFSGVPDRFSGSGSGTDFTLKISRVEPEDLGVYYCLQSSHFPWTFGGGTKLELK

SEQ ID NO: 727 - protein, 204 aa, Artificial Sequence
  source: /note="Description of Artificial Sequence: Synthetic polypeptide"
FESGLDLSDAEPDAGEATAYASKDLEEQLRSVSSVDELMTVLYPEYWKMYKCQLRKGGWQHNREQANLNSRTEETIKFAAAHYNTEILKSIDNEWRKTQCMPREVCIDVGKEFGVATNTFFKPPCVSVYRCGGCCNSEGLQCMNTSTSYLSKTLFEITVPLSQGPKPVTISFANHTSCRCMSKLDVYRQVHSIIRRGSHHHHHH

SEQ ID NO: 728 - protein, 226 aa, Artificial Sequence; identical to SEQ ID NO: 705
  source: /note="Description of Artificial Sequence: Synthetic polypeptide"

SEQ ID NO: 729 - protein, 196 aa, Homo sapiens
FESGLDLSDAEPDAGEATAYASKDLEEQLRSVSSVDELMTVLYPEYWKMYKCQLRKGGWQHNREQANLNSRTEETIKFAAAHYNTEILKSIDNEWRKTQCMPREVCIDVGKEFGVATNTFFKPPCVSVYRCGGCCNSEGLQCMNTSTSYLSKTLFEITVPLSQGPKPVTISFANHTSCRCMSKLDVYRQVHSIIRR

SEQ ID NO: 730 - protein, 216 aa, Artificial Sequence
  source: /note="Description of Artificial Sequence: Synthetic polypeptide"
DIVLTQPPSVSGAPGQRVTISCSGSSSNIVSNYVNWYQQLPGTAPKLLIYDNNKRPSGVPDRFSGSKSGTSASLAITGLQSEDEADYYCQSYAIGSYSVVFGGGTKLTVLGQPKAAPSVTLFPPSSEELQANKATLVCLISDFYPGAVTVAWKADSSPVKAGVETTTPSKQSNNKYAASSYLSLTPEQWKSHRSYSCQVTHEGSTVEKTVAPTECS

SEQ ID NO: 731 - protein, 124 aa, Artificial Sequence
  source: /note="Description of Artificial Sequence: Synthetic polypeptide"
AHYNTEILKSIDNEWRKTQCMPREVCIDVGKEFGVATNTFFKPPCVSVYRCGGCCNSEGLQCMNTSTSYLSKTLFEITVPLSQGPKPVTISFANHTSCRCMSKLDVYRQVHSIIRRGSHHHHHH

SEQ ID NO: 732 - protein, 116 aa, Homo sapiens
AHYNTEILKSIDNEWRKTQCMPREVCIDVGKEFGVATNTFFKPPCVSVYRCGGCCNSEGLQCMNTSTSYLSKTLFEITVPLSQGPKPVTISFANHTSCRCMSKLDVYRQVHSIIRR

SEQ ID NO: 733 - protein, 133 aa, Artificial Sequence
  source: /note="Description of Artificial Sequence: Synthetic polypeptide"
TEETIKFAAAHYNTEILKSIDNEWRKTQCMPREVCIDVGKEFGVATNTFFKPPCVSVYRCGGCCNSEGLQCMNTSTSYLSKTLFEITVPLSQGPKPVTISFANHTSCRCMSKLDVYRQVHSIIRRGSHHHHHH

SEQ ID NO: 734 - protein, 125 aa, Homo sapiens
TEETIKFAAAHYNTEILKSIDNEWRKTQCMPREVCIDVGKEFGVATNTFFKPPCVSVYRCGGCCNSEGLQCMNTSTSYLSKTLFEITVPLSQGPKPVTISFANHTSCRCMSKLDVYRQVHSIIRR

SEQ ID NO: 735 - protein, 133 aa, Artificial Sequence
  source: /note="Description of Artificial Sequence: Synthetic polypeptide"
TEETIKFAAAHYNTEILKSIDNEWRKTQCMPREVAIDVGKEFGVATNTFFKPPCVSVYRCGGCCNSEGLQCMNTSTSYLSKTLFEITVPLSQGPKPVTISFANHTSCRCMSKLDVYRQVHSIIRRGSHHHHHH

SEQ ID NO: 736 - protein, 125 aa, Artificial Sequence
  source: /note="Description of Artificial Sequence: Synthetic polypeptide"
TEETIKFAAAHYNTEILKSIDNEWRKTQCMPREVAIDVGKEFGVATNTFFKPPCVSVYRCGGCCNSEGLQCMNTSTSYLSKTLFEITVPLSQGPKPVTISFANHTSCRCMSKLDVYRQVHSIIRR

SEQ ID NO: 737 - protein, 124 aa, Artificial Sequence
  source: /note="Description of Artificial Sequence: Synthetic polypeptide"
AHYNTEILKSIDNEWRKTQCMPREVAIDVGKEFGVATNTFFKPPCVSVYRCGGCCNSEGLQCMNTSTSYLSKTLFEITVPLSQGPKPVTISFANHTSCRCMSKLDVYRQVHSIIRRGSHHHHHH

SEQ ID NO: 738 - protein, 116 aa, Artificial Sequence
  source: /note="Description of Artificial Sequence: Synthetic polypeptide"
AHYNTEILKSIDNEWRKTQCMPREVAIDVGKEFGVATNTFFKPPCVSVYRCGGCCNSEGLQCMNTSTSYLSKTLFEITVPLSQGPKPVTISFANHTSCRCMSKLDVYRQVHSIIRR

SEQ ID NO: 739 - protein, 80 aa, Homo sapiens
FESGLDLSDAEPDAGEATAYASKDLEEQLRSVSSVDELMTVLYPEYWKMYKCQLRKGGWQHNREQANLNSRTEETIKFAA

SEQ ID NO: 740 - protein, 9 aa, Homo sapiens
TEETIKFAA

SEQ ID NO: 741 - protein, 116 aa, Artificial Sequence; identical to SEQ ID NO: 732
  source: /note="Description of Artificial Sequence: Synthetic polypeptide"
  VARIANT (26)..(26): /replace="Ala"

SEQ ID NO: 742 - protein, 116 aa, Homo sapiens; identical to SEQ ID NO: 732

SEQ ID NO: 743 - protein, 116 aa, Artificial Sequence; identical to SEQ ID NO: 738
  source: /note="Description of Artificial Sequence: Synthetic polypeptide"

SEQ ID NO: 744 - protein, 12 aa, Artificial Sequence
  source: /note="Description of Artificial Sequence: Synthetic peptide"
GDSMLSNSDTWN

SEQ ID NO: 745 - protein, 7 aa, Artificial Sequence
  source: /note="Description of Artificial Sequence: Synthetic peptide"
SNSDTWN

SEQ ID NO: 746 - protein, 18 aa, Artificial Sequence
  source: /note="Description of Artificial Sequence: Synthetic peptide"
RTYHRSTWYDDYASSVRG

SEQ ID NO: 747 - protein, 18 aa, Artificial Sequence
  source: /note="Description of Artificial Sequence: Synthetic peptide"
RTYHRSTWYDDYASSVRG

SEQ ID NO: 748 - protein, 15 aa, Artificial Sequence
  source: /note="Description of Artificial Sequence: Synthetic peptide"
VRLQDGNSWSDAFDV

SEQ ID NO: 749 - protein, 15 aa, Artificial Sequence
  source: /note="Description of Artificial Sequence: Synthetic peptide"
VRLQDGNSWSDAFDV

SEQ ID NO: 750 - protein, 14 aa, Artificial Sequence
  source: /note="Description of Artificial Sequence: Synthetic peptide"
TGTSSDVGGYNYVS

SEQ ID NO: 751 - protein, 7 aa, Artificial Sequence
  source: /note="Description of Artificial Sequence: Synthetic peptide"
DVSNRPS

SEQ ID NO: 752 - protein, 11 aa, Artificial Sequence
  source: /note="Description of Artificial Sequence: Synthetic peptide"
SSYTSSSTLYV

SEQ ID NO: 753 - protein, 253 aa, Artificial Sequence
  source: /note="Description of Artificial Sequence: Synthetic polypeptide"
EVQLQQSGPGLVKPSQTLSLTCAISGDSMLSNSDTWNWIRQSPSRGLEWLGRTYHRSTWYDDYASSVRGRVSINVDTSKNQYSLQLNAVTPEDTGVYYCARVRLQDGNSWSDAFDVWGQGTMVTVSSGGGGSGGGGSGGGGSQSALTQPASASGSPGQSVTISCTGTSSDVGGYNYVSWYQQHPGKAPKLMIYDVSNRPSGVSNRFSGSKSGNTASLTISGLQAEDEADYYCSSYTSSSTLYVFGTGTQLTVL

SEQ ID NO: 754 - protein, 127 aa, Artificial Sequence
  source: /note="Description of Artificial Sequence: Synthetic polypeptide"
EVQLQQSGPGLVKPSQTLSLTCAISGDSMLSNSDTWNWIRQSPSRGLEWLGRTYHRSTWYDDYASSVRGRVSINVDTSKNQYSLQLNAVTPEDTGVYYCARVRLQDGNSWSDAFDVWGQGTMVTVSS

SEQ ID NO: 755 - protein, 111 aa, Artificial Sequence
  source: /note="Description of Artificial Sequence: Synthetic polypeptide"
QSALTQPASASGSPGQSVTISCTGTSSDVGGYNYVSWYQQHPGKAPKLMIYDVSNRPSGVSNRFSGSKSGNTASLTISGLQAEDEADYYCSSYTSSSTLYVFGTGTQLTVL

SEQ ID NO: 756 - protein, 13 aa, Artificial Sequence
  source: /note="Description of Artificial Sequence: Synthetic peptide"
LEEKKGNYVVTDH

SEQ ID NO: 757 - protein, 465 aa, Artificial Sequence
  source: /note="Description of Artificial Sequence: Synthetic polypeptide"
DIQMTQTTSSLSASLGDRVTISCRASQDISKYLNWYQQKPDGTVKLLIYHTSRLHSGVPSRFSGSGSGTDYSLTISNLEQEDIATYFCQQGNTLPYTFGGGTKLEITGGGGSGGGGSGGGGSEVKLQESGPGLVAPSQSLSVTCTVSGVSLPDYGVSWIRQPPRKGLEWLGVIWGSETTYYNSALKSRLTIIKDNSKSQVFLKMNSLQTDDTAIYYCAKHYYYGGSYAMDYWGQGTSVTVSSTTTPAPRPPTPAPTIASQPLSLRPEACRPAAGGAVHTRGLDFACDIYIWAPLAGTCGVLLLSLVITLYCKRGRKKLLYIFKQPFMRPVQTTQEEDGCSCRFPEEEEGGCELRVKFSRSADAPAYKQGQNQLYNELNLGRREEYDVLDKRRGRDPEMGGKPRRKNPQEGLYNELQKDKMAEAYSEIGMKGERRRGKGHDGLYQGLSTATKDTYDALHMQALPPR

SEQ ID NO: 758 - protein, 242 aa, Artificial Sequence
  source: /note="Description of Artificial Sequence: Synthetic polypeptide"
EIVMTQSPATLSLSPGERATLSCRASQDISKYLNWYQQKPGQAPRLLIYHTSRLHSGIPARFSGSGSGTDYTLTISSLQPEDFAVYFCQQGNTLPYTFGQGTKLEIKGGGGSGGGGSGGGGSQVQLQESGPGLVKPSETLSLTCTVSGVSLPDYGVSWIRQPPGKGLEWIGVIWGSETTYYQSSLKSRVTISKDNSKNQVSLKLSSVTAADTAVYYCAKHYYYGGSYAMDYWGQGTLVTVSS

SEQ ID NO: 759 - protein, 465 aa, Artificial Sequence
  source: /note="Description of Artificial Sequence: Synthetic polypeptide"
EIVMTQSPATLSLSPGERATLSCRASQDISKYLNWYQQKPGQAPRLLIYHTSRLHSGIPARFSGSGSGTDYTLTISSLQPEDFAVYFCQQGNTLPYTFGQGTKLEIKGGGGSGGGGSGGGGSQVQLQESGPGLVKPSETLSLTCTVSGVSLPDYGVSWIRQPPGKGLEWIGVIWGSETTYYQSSLKSRVTISKDNSKNQVSLKLSSVTAADTAVYYCAKHYYYGGSYAMDYWGQGTLVTVSSTTTPAPRPPTPAPTIASQPLSLRPEACRPAAGGAVHTRGLDFACDIYIWAPLAGTCGVLLLSLVITLYCKRGRKKLLYIFKQPFMRPVQTTQEEDGCSCRFPEEEEGGCELRVKFSRSADAPAYKQGQNQLYNELNLGRREEYDVLDKRRGRDPEMGGKPRRKNPQEGLYNELQKDKMAEAYSEIGMKGERRRGKGHDGLYQGLSTATKDTYDALHMQALPPR

SEQ ID NO: 760 - protein, 5 aa, Artificial Sequence
  source: /note="Description of Artificial Sequence: Synthetic peptide"
DYGVS

SEQ ID NO: 761 - protein, 16 aa, Artificial Sequence
  source: /note="Description of Artificial Sequence: Synthetic peptide"
VIWGSETTYYNSALKS

SEQ ID NO: 762 - protein, 12 aa, Artificial Sequence
  source: /note="Description of Artificial Sequence: Synthetic peptide"
HYYYGGSYAMDY

SEQ ID NO: 763 - protein, 11 aa, Artificial Sequence
  source: /note="Description of Artificial Sequence: Synthetic peptide"
RASQDISKYLN

SEQ ID NO: 764 - protein, 7 aa, Artificial Sequence
  source: /note="Description of Artificial Sequence: Synthetic peptide"
HTSRLHS

SEQ ID NO: 765 - protein, 9 aa, Artificial Sequence
  source: /note="Description of Artificial Sequence: Synthetic peptide"
QQGNTLPYT

SEQ ID NO: 766 - protein, 486 aa, Artificial Sequence
  source: /note="Description of Artificial Sequence: Synthetic polypeptide"
MALPVTALLLPLALLLHAARPDIQMTQTTSSLSASLGDRVTISCRASQDISKYLNWYQQKPDGTVKLLIYHTSRLHSGVPSRFSGSGSGTDYSLTISNLEQEDIATYFCQQGNTLPYTFGGGTKLEITGGGGSGGGGSGGGGSEVKLQESGPGLVAPSQSLSVTCTVSGVSLPDYGVSWIRQPPRKGLEWLGVIWGSETTYYNSALKSRLTIIKDNSKSQVFLKMNSLQTDDTAIYYCAKHYYYGGSYAMDYWGQGTSVTVSSTTTPAPRPPTPAPTIASQPLSLRPEACRPAAGGAVHTRGLDFACDIYIWAPLAGTCGVLLLSLVITLYCKRGRKKLLYIFKQPFMRPVQTTQEEDGCSCRFPEEEEGGCELRVKFSRSADAPAYKQGQNQLYNELNLGRREEYDVLDKRRGRDPEMGGKPRRKNPQEGLYNELQKDKMAEAYSEIGMKGERRRGKGHDGLYQGLSTATKDTYDALHMQALPPR

SEQ ID NO: 767 - protein, 10 aa, Artificial Sequence
  source: /note="Description of Artificial Sequence: Synthetic peptide"
GGGGSGGGGS

SEQ ID NO: 768 - protein, 5 aa, Artificial Sequence
  source: /note="Description of Artificial Sequence: Synthetic peptide"
GGGGS

SEQ ID NO: 769 - protein, 5 aa, Artificial Sequence
  source: /note="Description of Artificial Sequence: Synthetic peptide"
NYNLH

SEQ ID NO: 770 - protein, 17 aa, Artificial Sequence
  source: /note="Description of Artificial Sequence: Synthetic peptide"
AIYPGNYDTSYNQKFKG

SEQ ID NO: 771 - protein, 13 aa, Artificial Sequence
  source: /note="Description of Artificial Sequence: Synthetic peptide"
VDFGHSRYWYFDV

SEQ ID NO: 772 - protein, 7 aa, Artificial Sequence
  source: /note="Description of Artificial Sequence: Synthetic peptide"
GYTFTNY

SEQ ID NO: 773 - protein, 6 aa, Artificial Sequence
  source: /note="Description of Artificial Sequence: Synthetic peptide"
YPGNYD

SEQ ID NO: 774 - protein, 8 aa, Artificial Sequence
  source: /note="Description of Artificial Sequence: Synthetic peptide"
GYTFTNYN

SEQ ID NO: 775 - protein, 8 aa, Artificial Sequence
  source: /note="Description of Artificial Sequence: Synthetic peptide"
IYPGNYDT

SEQ ID NO: 776 - protein, 15 aa, Artificial Sequence
  source: /note="Description of Artificial Sequence: Synthetic peptide"
ARVDFGHSRYWYFDV

SEQ ID NO: 777 - protein, 10 aa, Artificial Sequence
  source: /note="Description of Artificial Sequence: Synthetic peptide"
GYTFTNYNLH

SEQ ID NO: 778 - protein, 122 aa, Artificial Sequence
  source: /note="Description of Artificial Sequence: Synthetic polypeptide"
QVQLVQSGAEVKKPGASVKVSCKASGYTFTNYNLHWVRQAPGQGLEWMGAIYPGNYDTSYNQKFKGRVTMTADKSTSTAYMELSSLRSEDTAVYYCARVDFGHSRYWYFDVWGQGTTVTVSS

SEQ ID NO: 779 - DNA, 366 bp, Artificial Sequence
  source: /note="Description of Artificial Sequence: Synthetic polynucleotide"
caagtccaactcgtccagtccggtgcagaagtcaagaaacctggagcatccgtgaaagtgtcttgcaaagcctccggctacaccttcaccaactacaacctccattgggtcagacaggcccccggacaaggactcgaatggatgggagcgatctacccgggaaactacgacaccagctacaaccagaagttcaagggccgcgtgactatgaccgccgataagagcacctccaccgcctacatggaactgtcctcgctgaggtccgaggacactgcggtgtactactgcgcccgcgtggacttcggacactcacggtattggtacttcgacgtctggggacagggcactaccgtgaccgtgtcgagc

SEQ ID NO: 780 - protein, 10 aa, Artificial Sequence
  source: /note="Description of Artificial Sequence: Synthetic peptide"
RATSSVSSMN

SEQ ID NO: 781 - protein, 7 aa, Artificial Sequence
  source: /note="Description of Artificial Sequence: Synthetic peptide"
ATSNLAS

SEQ ID NO: 782 - protein, 9 aa, Artificial Sequence
  source: /note="Description of Artificial Sequence: Synthetic peptide"
QQWTFNPPT

SEQ ID NO: 783 - protein, 6 aa, Artificial Sequence
  source: /note="Description of Artificial Sequence: Synthetic peptide"
TSSVSS

SEQ ID NO: 784 - protein, 3 aa, Artificial Sequence
  source: /note="Description of Artificial Sequence: Synthetic peptide"
ATS

SEQ ID NO: 785 - protein, 6 aa, Artificial Sequence
  source: /note="Description of Artificial Sequence: Synthetic peptide"
WTFNPP

SEQ ID NO: 786 - protein, 5 aa, Artificial Sequence
  source: /note="Description of Artificial Sequence: Synthetic peptide"
SSVSS

SEQ ID NO: 787 - protein, 106 aa, Artificial Sequence
  source: /note="Description of Artificial Sequence: Synthetic polypeptide"
DIQLTQSPSFLSASVGDRVTITCRATSSVSSMNWYQQKPGKAPKPLIHATSNLASGVPSRFSGSGSGTEYTLTISSLQPEDFATYYCQQWTFNPPTFGQGTKLEIK

SEQ ID NO: 788 - DNA, 318 bp, Artificial Sequence
  source: /note="Description of Artificial Sequence: Synthetic polynucleotide"
gatatccagctgactcagtccccgtcattcctgtccgcctccgtgggagacagagtgaccatcacctgtcgggccacttcctccgtgtcaagcatgaactggtatcagcagaagcccgggaaggccccaaagccgctgattcacgcgacgtccaacctggcttccggcgtgccgagccggttctccggctcggggagcgggactgagtacaccctgactatttcctcgcttcaacccgaggactttgctacctactactgccaacagtggaccttcaatcctccgacattcggacagggtaccaagttggaaatcaag

SEQ ID NO: 789 - protein, 248 aa, Artificial Sequence
  source: /note="Description of Artificial Sequence: Synthetic polypeptide"
QVQLVQSGAEVKKPGASVKVSCKASGYTFTNYNLHWVRQAPGQGLEWMGAIYPGNYDTSYNQKFKGRVTMTADKSTSTAYMELSSLRSEDTAVYYCARVDFGHSRYWYFDVWGQGTTVTVSSGGGGSGGGGSGGGGSGGGGSDIQLTQSPSFLSASVGDRVTITCRATSSVSSMNWYQQKPGKAPKPLIHATSNLASGVPSRFSGSGSGTEYTLTISSLQPEDFATYYCQQWTFNPPTFGQGTKLEIK

SEQ ID NO: 790 - DNA, 744 bp, Artificial Sequence
  source: /note="Description of Artificial Sequence: Synthetic polynucleotide"
caagtccaactcgtccagtccggtgcagaagtcaagaaacctggagcatccgtgaaagtgtcttgcaaagcctccggctacaccttcaccaactacaacctccattgggtcagacaggcccccggacaaggactcgaatggatgggagcgatctacccgggaaactacgacaccagctacaaccagaagttcaagggccgcgtgactatgaccgccgataagagcacctccaccgcctacatggaactgtcctcgctgaggtccgaggacactgcggtgtactactgcgcccgcgtggacttcggacactcacggtattggtacttcgacgtctggggacagggcactaccgtgaccgtgtcgagcggcggaggaggttcgggagggggcggatcagggggcggcggcagcggtggagggggctcggatatccagctgactcagtccccgtcattcctgtccgcctccgtgggagacagagtgaccatcacctgtcgggccacttcctccgtgtcaagcatgaactggtatcagcagaagcccgggaaggccccaaagccgctgattcacgcgacgtccaacctggcttccggcgtgccgagccggttctccggctcggggagcgggactgagtacaccctgactatttcctcgcttcaacccgaggactttgctacctactactgccaacagtggaccttcaatcctccgacattcggacagggtaccaagttggaaatcaag

SEQ ID NO: 791 - protein, 492 aa, Artificial Sequence
  source: /note="Description of Artificial Sequence: Synthetic polypeptide"
MALPVTALLLPLALLLHAARPQVQLVQSGAEVKKPGASVKVSCKASGYTFTNYNLHWVRQAPGQGLEWMGAIYPGNYDTSYNQKFKGRVTMTADKSTSTAYMELSSLRSEDTAVYYCARVDFGHSRYWYFDVWGQGTTVTVSSGGGGSGGGGSGGGGSGGGGSDIQLTQSPSFLSASVGDRVTITCRATSSVSSMNWYQQKPGKAPKPLIHATSNLASGVPSRFSGSGSGTEYTLTISSLQPEDFATYYCQQWTFNPPTFGQGTKLEIKTTTPAPRPPTPAPTIASQPLSLRPEACRPAAGGAVHTRGLDFACDIYIWAPLAGTCGVLLLSLVITLYCKRGRKKLLYIFKQPFMRPVQTTQEEDGCSCRFPEEEEGGCELRVKFSRSADAPAYQQGQNQLYNELNLGRREEYDVLDKRRGRDPEMGGKPRRKNPQEGLYNELQKDKMAEAYSEIGMKGERRRGKGHDGLYQGLSTATKDTYDALHMQALPPR

SEQ ID NO: 792 - DNA, 1476 bp, Artificial Sequence
  source: /note="Description of Artificial Sequence: Synthetic polynucleotide"
atggccctccctgtcaccgccctgctgcttccgctggctcttctgctccacgccgctcggccccaagtccaactcgtccagtccggtgcagaagtcaagaaacctggagcatccgtgaaagtgtcttgcaaagcctccggctacaccttcaccaactacaacctccattgggtcagacaggcccccggacaaggactcgaatggatgggagcgatctacccgggaaactacgacaccagctacaaccagaagttcaagggccgcgtgactatgaccgccgataagagcacctccaccgcctacatggaactgtcctcgctgaggtccgaggacactgcggtgtactactgcgcccgcgtggacttcggacactcacggtattggtacttcgacgtctggggacagggcactaccgtgaccgtgtcgagcggcggaggaggttcgggagggggcggatcagggggcggcggcagcggtggagggggctcggatatccagctgactcagtccccgtcattcctgtccgcctccgtgggagacagagtgaccatcacctgtcgggccacttcctccgtgtcaagcatgaactggtatcagcagaagcccgggaaggccccaaagccgctgattcacgcgacgtccaacctggcttccggcgtgccgagccggttctccggctcggggagcgggactgagtacaccctgactatttcctcgcttcaacccgaggactttgctacctactactgccaacagtggaccttcaatcctccgacattcggacagggtaccaagttggaaatcaagaccactaccccagcaccgaggccacccaccccggctcctaccatcgcctcccagcctctgtccctgcgtccggaggcatgtagacccgcagctggtggggccgtgcatacccggggtcttgacttcgcctgcgatatctacatttgggcccctctggctggtacttgcggggtcctgctgctttcactcgtgatcactctttactgtaagcgcggtcggaagaagctgctgtacatctttaagcaacccttcatgaggcctgtgcagactactcaagaggaggacggctgttcatgccggttcccagaggaggaggaaggcggctgcgaactgcgcgtgaaattcagccgcagcgcagatgctccagcctaccagcaggggcagaaccagctctacaacgaactcaatcttggtcggagagaggagtacgacgtgctggacaagcggagaggacgggacccagaaatgggcgggaagccgcgcagaaagaatccccaagagggcctgtacaacgagctccaaaaggataagatggcagaagcctatagcgagattggtatgaaaggggaacgcagaagaggcaaaggccacgacggactgtaccagggactcagcaccgccaccaaggacacctatgacgctcttcacatgcaggccctgccgcctcgg

SEQ ID NO: 793 - protein, 5 aa, Artificial Sequence
  source: /note="Description of Artificial Sequence: Synthetic peptide"
SYNMH

SEQ ID NO: 794 - protein, 17 aa, Artificial Sequence
  source: /note="Description of Artificial Sequence: Synthetic peptide"
AIYPGNGDTSYNPKFKG

SEQ ID NO: 795 - protein, 13 aa, Artificial Sequence
  source: /note="Description of Artificial Sequence: Synthetic peptide"
SYFYGSSSWYFDV

SEQ ID NO: 796 - protein, 6 aa, Artificial Sequence
  source: /note="Description of Artificial Sequence: Synthetic peptide"
YPGNGD

SEQ ID NO: 797 - protein, 8 aa, Artificial Sequence
  source: /note="Description of Artificial Sequence: Synthetic peptide"
GYTFTSYN

SEQ ID NO: 798 - protein, 8 aa, Artificial Sequence
  source: /note="Description of Artificial Sequence: Synthetic peptide"
IYPGNGDT

SEQ ID NO: 799 - protein, 15 aa, Artificial Sequence
  source: /note="Description of Artificial Sequence: Synthetic peptide"
ARSYFYGSSSWYFDV

SEQ ID NO: 800 - protein, 10 aa, Artificial Sequence
  source: /note="Description of Artificial Sequence: Synthetic peptide"
GYTFTSYNMH

SEQ ID NO: 801 - protein, 122 aa, Artificial Sequence
  source: /note="Description of Artificial Sequence: Synthetic polypeptide"
QVQLVQSGAEVKKPGASVKVSCKASGYTFTSYNMHWVRQAPGQGLEWMGAIYPGNGDTSYNPKFKGRVTMTADKSTRTAYMELSSLRSEDTAVYYCARSYFYGSSSWYFDVWGQGTTVTVSS

SEQ ID NO: 802 - DNA, 366 bp, Artificial Sequence
  source: /note="Description of Artificial Sequence: Synthetic polynucleotide"
caagtgcagctcgtccagtccggtgcagaagtcaagaaacccggtgcttcagtgaaagtgtcctgcaaggcctccggttacaccttcacctcctacaacatgcactgggtccgccaagccccgggccagggactcgaatggatgggagccatctaccctggcaacggggacacctcatacaaccctaagttcaagggcagagtgaccatgactgcggacaagtccactagaacagcgtacatggagctgagcagcctgcggtccgaggatactgccgtgtactactgcgcccgctcctacttctacggaagctcgtcgtggtacttcgatgtctggggacagggcaccactgtgactgtgtcctcc

SEQ ID NO: 803 - protein, 10 aa, Artificial Sequence
  source: /note="Description of Artificial Sequence: Synthetic peptide"
RASSSVSSMH

SEQ ID NO: 804 - protein, 9 aa, Artificial Sequence
  source: /note="Description of Artificial Sequence: Synthetic peptide"
QQWIFNPPT

SEQ ID NO: 805 - protein, 6 aa, Artificial Sequence
  source: /note="Description of Artificial Sequence: Synthetic peptide"
SSSVSS

SEQ ID NO: 806 - protein, 6 aa, Artificial Sequence
  source: /note="Description of Artificial Sequence: Synthetic peptide"
WIFNPP

SEQ ID NO: 807 - protein, 106 aa, Artificial Sequence
  source: /note="Description of Artificial Sequence: Synthetic polypeptide"
EIVLTQSPATLSLSPGERATLSCRASSSVSSMHWYQQKPGQAPRPLIFATSNLASGIPARFSGSGSGTDYTLTISSLEPEDAAVYYCQQWIFNPPTFGGGTKVEIK

SEQ ID NO: 808 - DNA, 318 bp, Artificial Sequence
  source: /note="Description of Artificial Sequence: Synthetic polynucleotide"
gaaattgtgctgactcagagccccgccaccctgagcttgtcccccggggaaagggcaacgctgtcatgccgcgcctcgtcatccgtgtcctccatgcattggtaccagcagaagccgggacaggcccctcggccgctgatcttcgccacctccaatctcgcttccggcattccggcccggttctcgggaagcgggtcggggaccgactataccctgaccatctctagccttgaacctgaggacgccgcggtgtactattgtcaacagtggatctttaaccccccaaccttcggtggaggcaccaaagtggagattaag

SEQ ID NO: 809 - protein, 248 aa, Artificial Sequence
  source: /note="Description of Artificial Sequence: Synthetic polypeptide"
QVQLVQSGAEVKKPGASVKVSCKASGYTFTSYNMHWVRQAPGQGLEWMGAIYPGNGDTSYNPKFKGRVTMTADKSTRTAYMELSSLRSEDTAVYYCARSYFYGSSSWYFDVWGQGTTVTVSSGGGGSGGGGSGGGGSGGGGSEIVLTQSPATLSLSPGERATLSCRASSSVSSMHWYQQKPGQAPRPLIFATSNLASGIPARFSGSGSGTDYTLTISSLEPEDAAVYYCQQWIFNPPTFGGGTKVEIK

SEQ ID NO: 810 - DNA, 744 bp, Artificial Sequence
  source: /note="Description of Artificial Sequence: Synthetic polynucleotide"
caagtgcagctcgtccagtccggtgcagaagtcaagaaacccggtgcttcagtgaaagtgtcctgcaaggcctccggttacaccttcacctcctacaacatgcactgggtccgccaagccccgggccagggactcgaatggatgggagccatctaccctggcaacggggacacctcatacaaccctaagttcaagggcagagtgaccatgactgcggacaagtccactagaacagcgtacatggagctgagcagcctgcggtccgaggatactgccgtgtactactgcgcccgctcctacttctacggaagctcgtcgtggtacttcgatgtctggggacagggcaccactgtgactgtgtcctccggtggcggaggctcgggcggaggcggaagcggcggcgggggatcgggaggaggagggtccgaaattgtgctgactcagagccccgccaccctgagcttgtcccccggggaaagggcaacgctgtcatgccgcgcctcgtcatccgtgtcctccatgcattggtaccagcagaagccgggacaggcccctcggccgctgatcttcgccacctccaatctcgcttccggcattccggcccggttctcgggaagcgggtcggggaccgactataccctgaccatctctagccttgaacctgaggacgccgcggtgtactattgtcaacagtggatctttaaccccccaaccttcggtggaggcaccaaagtggagattaag

SEQ ID NO: 811 - protein, 492 aa, Artificial Sequence
  source: /note="Description of Artificial Sequence: Synthetic polypeptide"
MALPVTALLLPLALLLHAARPQVQLVQSGAEVKKPGASVKVSCKASGYTFTSYNMHWVRQAPGQGLEWMGAIYPGNGDTSYNPKFKGRVTMTADKSTRTAYMELSSLRSEDTAVYYCARSYFYGSSSWYFDVWGQGTTVTVSSGGGGSGGGGSGGGGSGGGGSEIVLTQSPATLSLSPGERATLSCRASSSVSSMHWYQQKPGQAPRPLIFATSNLASGIPARFSGSGSGTDYTLTISSLEPEDAAVYYCQQWIFNPPTFGGGTKVEIKTTTPAPRPPTPAPTIASQPLSLRPEACRPAAGGAVHTRGLDFACDIYIWAPLAGTCGVLLLSLVITLYCKRGRKKLLYIFKQPFMRPVQTTQEEDGCSCRFPEEEEGGCELRVKFSRSADAPAYQQGQNQLYNELNLGRREEYDVLDKRRGRDPEMGGKPRRKNPQEGLYNELQKDKMAEAYSEIGMKGERRRGKGHDGLYQGLSTATKDTYDALHMQALPPR

SEQ ID NO: 812 - DNA, 1476 bp, Artificial Sequence
  source: /note="Description of Artificial Sequence: Synthetic polynucleotide"
atggccctccctgtcaccgccctgctgcttccgctggctcttctgctccacgccgctcggccccaagtgcagctcgtccagtccggtgcagaagtcaagaaacccggtgcttcagtgaaagtgtcctgcaaggcctccggttacaccttcacctcctacaacatgcactgggtccgccaagccccgggccagggactcgaatggatgggagccatctaccctggcaacggggacacctcatacaaccctaagttcaagggcagagtgaccatgactgcggacaagtccactagaacagcgtacatggagctgagcagcctgcggtccgaggatactgccgtgtactactgcgcccgctcctacttctacggaagctcgtcgtggtacttcgatgtctggggacagggcaccactgtgactgtgtcctccggtggcggaggctcgggcggaggcggaagcggcggcgggggatcgggaggaggagggtccgaaattgtgctgactcagagccccgccaccctgagcttgtcccccggggaaagggcaacgctgtcatgccgcgcctcgtcatccgtgtcctccatgcattggtaccagcagaagccgggacaggcccctcggccgctgatcttcgccacctccaatctcgcttccggcattccggcccggttctcgggaagcgggtcggggaccgactataccctgaccatctctagccttgaacctgaggacgccgcggtgtactattgtcaacagtggatctttaaccccccaaccttcggtggaggcaccaaagtggagattaagaccactaccccagcaccgaggccacccaccccggctcctaccatcgcctcccagcctctgtccctgcgtccggaggcatgtagacccgcagctggtggggccgtgcatacccggggtcttgacttcgcctgcgatatctacatttgggcccctctggctggtacttgcggggtcctgctgctttcactcgtgatcactctttactgtaagcgcggtcggaagaagctgctgtacatctttaagcaacccttcatgaggcctgtgcagactactcaagaggaggacggctgttcatgccggttcccagaggaggaggaaggcggctgcgaactgcgcgtgaaattcagccgcagcgcagatgctccagcctaccagcaggggcagaaccagctctacaacgaactcaatcttggtcggagagaggagtacgacgtgctggacaagcggagaggacgggacccagaaatgggcgggaagccgcgcagaaagaatccccaagagggcctgtacaacgagctccaaaaggataagatggcagaagcctatagcgagattggtatgaaaggggaacgcagaagaggcaaaggccacgacggactgtaccagggactcagcaccgccaccaaggacacctatgacgctcttcacatgcaggccctgccgcctcgg

SEQ ID NO: 813 - DNA, 2238 bp, Artificial Sequence
  source: /note="Description of Artificial Sequence: Synthetic polynucleotide"
atggccctccctgtcaccgccctgctgcttccgctggctcttctgctccacgccgctcggcccgaaattgtgatgacccagtcacccgccactcttagcctttcacccggtgagcgcgcaaccctgtcttgcagagcctcccaagacatctcaaaataccttaattggtatcaacagaagcccggacaggctcctcgccttctgatctaccacaccagccggctccattctggaatccctgccaggttcagcggtagcggatctgggaccgactacaccctcactatcagctcactgcagccagaggacttcgctgtctatttctgtcagcaagggaacaccctgccctacacctttggacagggcaccaagctcgagattaaaggtggaggtggcagcggaggaggtgggtccggcggtggaggaagccaggtccaactccaagaaagcggaccgggtcttgtgaagccatcagaaactctttcactgacttgtactgtgagcggagtgtctctccccgattacggggtgtcttggatcagacagccaccggggaagggtctggaatggattggagtgatttggggctctgagactacttactaccaatcatccctcaagtcacgcgtcaccatctcaaaggacaactctaagaatcaggtgtcactgaaactgtcatctgtgaccgcagccgacaccgccgtgtactattgcgctaagcattactattatggcgggagctacgcaatggattactggggacagggtactctggtcaccgtgtccagcttggcagaagccgccgcgaaagaagtgcagcttcaacaatcaggaccaggactcgtcaaaccatcacagaccctctccctcacatgtgccatctccggggactccatgttgagcaattccgacacttggaattggattagacaaagcccgtcccggggtctggaatggttgggacgcacctaccaccggtctacttggtacgacgactacgcgtcatccgtgcggggaagagtgtccatcaacgtggacacctccaagaaccagtacagcctgcagcttaatgccgtgactcctgaggatacgggcgtctactactgcgcccgcgtccgcctgcaagacgggaacagctggagcgatgcattcgatgtctggggccagggaactatggtcaccgtgtcgtctgggggcggtggatcgggtggcgggggttcggggggcggcggctctcagtccgctcttacccaaccggcctcagcctcggggagccccggccagagcgtgaccatttcctgcaccggcacttcatccgacgtgggcggctacaactacgtgtcctggtaccaacagcacccgggaaaggcccccaagctcatgatctacgacgtgtccaacaggccctcgggagtgtccaaccggttctcgggttcgaaatcgggaaacacagccagcctgaccatcagcggactgcaggctgaagatgaagccgactactactgctcctcctacacctcgtcatccacgctctacgtgttcggcactggaactcagctgactgtgctgaccactaccccagcaccgaggccacccaccccggctcctaccatcgcctcccagcctctgtccctgcgtccggaggcatgtagacccgcagctggtggggccgtgcatacccggggtcttgacttcgcctgcgatatctacatttgggcccctctggctggtacttgcggggtcctgctgctttcactcgtgatcactctttactgtaagcgcggtcggaagaagctgctgtacatctttaagcaacccttcatgaggcctgtgcagactactcaagaggaggacggctgttcatgccggttcccagaggaggaggaaggcggctgcgaactgcgcgtgaaattcagccgcagcgcagatgctccagcctaccagcaggggcagaaccagctctacaacgaactcaatcttggtcggagagaggagtacgacgtgctggacaagcggagaggacgggacccagaaatgggcgggaagccgcgcagaaagaatccccaagagggcctgtacaacgagctccaaaaggataagatggcagaagcctatagcgagattggtatgaaaggggaacgcagaagaggcaaaggccacgacggactgtaccagggactcagcaccgccaccaaggacacctatgacgctcttcacatgcaggccctgccgcctcgg

SEQ ID NO: 814 - protein, 746 aa, Artificial Sequence
  source: /note="Description of Artificial Sequence: Synthetic polypeptide"
MALPVTALLLPLALLLHAARPEIVMTQSPATLSLSPGERATLSCRASQDISKYLNWYQQKPGQAPRLLIYHTSRLHSGIPARFSGSGSGTDYTLTISSLQPEDFAVYFCQQGNTLPYTFGQGTKLEIKGGGGSGGGGSGGGGSQVQLQESGPGLVKPSETLSLTCTVSGVSLPDYGVSWIRQPPGKGLEWIGVIWGSETTYYQSSLKSRVTISKDNSKNQVSLKLSSVTAADTAVYYCAKHYYYGGSYAMDYWGQGTLVTVSSLAEAAAKEVQLQQSGPGLVKPSQTLSLTCAISGDSMLSNSDTWNWIRQSPSRGLEWLGRTYHRSTWYDDYASSVRGRVSINVDTSKNQYSLQLNAVTPEDTGVYYCARVRLQDGNSWSDAFDVWGQGTMVTVSSGGGGSGGGGSGGGGSQSALTQPASASGSPGQSVTISCTGTSSDVGGYNYVSWYQQHPGKAPKLMIYDVSNRPSGVSNRFSGSKSGNTASLTISGLQAEDEADYYCSSYTSSSTLYVFGTGTQLTVLTTTPAPRPPTPAPTIASQPLSLRPEACRPAAGGAVHTRGLDFACDIYIWAPLAGTCGVLLLSLVITLYCKRGRKKLLYIFKQPFMRPVQTTQEEDGCSCRFPEEEEGGCELRVKFSRSADAPAYQQGQNQLYNELNLGRREEYDVLDKRRGRDPEMGGKPRRKNPQEGLYNELQKDKMAEAYSEIGMKGERRRGKGHDGLYQGLSTATKDTYDALHMQALPPR

SEQ ID NO: 815 - DNA, 2232 bp, Artificial Sequence
  source: /note="Description of Artificial Sequence: Synthetic polynucleotide"
atggccctccctgtcaccgccctgctgcttccgctggctcttctgctccacgccgctcggcccgaagtgcagcttcaacaatcaggaccaggactcgtcaaaccatcacagaccctctccctcacatgtgccatctccggggactccatgttgagcaattccgacacttggaattggattagacaaagcccgtcccggggtctggaatggttgggacgcacctaccaccggtctacttggtacgacgactacgcgtcatccgtgcggggaagagtgtccatcaacgtggacacctccaagaaccagtacagcctgcagcttaatgccgtgactcctgaggatacgggcgtctactactgcgcccgcgtccgcctgcaagacgggaacagctggagcgatgcattcgatgtctggggccagggaactatggtcaccgtgtcgtctgggggcggtggatcgggtggcgggggttcggggggcggcggctctcagtccgctcttacccaaccggcctcagcctcggggagccccggccagagcgtgaccatttcctgcaccggcacttcatccgacgtgggcggctacaactacgtgtcctggtaccaacagcacccgggaaaggcccccaagctcatgatctacgacgtgtccaacaggccctcgggagtgtccaaccggttctcgggttcgaaatcgggaaacacagccagcctgaccatcagcggactgcaggctgaagatgaagccgactactactgctcctcctacacctcgtcatccacgctctacgtgttcggcactggaactcagctgactgtgctgggagggggagggagtgaaattgtgatgacccagtcacccgccactcttagcctttcacccggtgagcgcgcaaccctgtcttgcagagcctcccaagacatctcaaaataccttaattggtatcaacagaagcccggacaggctcctcgccttctgatctaccacaccagccggctccattctggaatccctgccaggttcagcggtagcggatctgggaccgactacaccctcactatcagctcactgcagccagaggacttcgctgtctatttctgtcagcaagggaacaccctgccctacacctttggacagggcaccaagctcgagattaaaggtggaggtggcagcggaggaggtgggtccggcggtggaggaagccaggtccaactccaagaaagcggaccgggtcttgtgaagccatcagaaactctttcactgacttgtactgtgagcggagtgtctctccccgattacggggtgtcttggatcagacagccaccggggaagggtctggaatggattggagtgatttggggctctgagactacttactaccaatcatccctcaagtcacgcgtcaccatctcaaaggacaactctaagaatcaggtgtcactgaaactgtcatctgtgaccgcagccgacaccgccgtgtactattgcgctaagcattactattatggcgggagctacgcaatggattactggggacagggtactctggtcaccgtgtccagcaccactaccccagcaccgaggccacccaccccggctcctaccatcgcctcccagcctctgtccctgcgtccggaggcatgtagacccgcagctggtggggccgtgcatacccggggtcttgacttcgcctgcgatatctacatttgggcccctctggctggtacttgcggggtcctgctgctttcactcgtgatcactctttactgtaagcgcggtcggaagaagctgctgtacatctttaagcaacccttcatgaggcctgtgcagactactcaagaggaggacggctgttcatgccggttcccagaggaggaggaaggcggctgcgaactgcgcgtgaaattcagccgcagcgcagatgctccagcctaccagcaggggcagaaccagctctacaacgaactcaatcttggtcggagagaggagtacgacgtgctggacaagcggagaggacgggacccagaaatgggcgggaagccgcgcagaaagaatccccaagagggcctgtacaacgagctccaaaaggataagatggcagaagcctatagcgagattggtatgaaaggggaacgcagaagaggcaaaggccacgacggactgtaccagggactcagcaccgccaccaaggacacctatgacgctcttcacatgcaggccctgccgcctcgg

SEQ ID NO: 816 - protein, 744 aa, Artificial Sequence
  source: /note="Description of Artificial Sequence: Synthetic polypeptide"
MALPVTALLLPLALLLHAARPEVQLQQSGPGLVKPSQTLSLTCAISGDSMLSNSDTWNWIRQSPSRGLEWLGRTYHRSTWYDDYASSVRGRVSINVDTSKNQYSLQLNAVTPEDTGVYYCARVRLQDGNSWSDAFDVWGQGTMVTVSSGGGGSGGGGSGGGGSQSALTQPASASGSPGQSVTISCTGTSSDVGGYNYVSWYQQHPGKAPKLMIYDVSNRPSGVSNRFSGSKSGNTASLTISGLQAEDEADYYCSSYTSSSTLYVFGTGTQLTVLGGGGSEIVMTQSPATLSLSPGERATLSCRASQDISKYLNWYQQKPGQAPRLLIYHTSRLHSGIPARFSGSGSGTDYTLTISSLQPEDFAVYFCQQGNTLPYTFGQGTKLEIKGGGGSGGGGSGGGGSQVQLQESGPGLVKPSETLSLTCTVSGVSLPDYGVSWIRQPPGKGLEWIGVIWGSETTYYQSSLKSRVTISKDNSKNQVSLKLSSVTAADTAVYYCAKHYYYGGSYAMDYWGQGTLVTVSSTTTPAPRPPTPAPTIASQPLSLRPEACRPAAGGAVHTRGLDFACDIYIWAPLAGTCGVLLLSLVITLYCKRGRKKLLYIFKQPFMRPVQTTQEEDGCSCRFPEEEEGGCELRVKFSRSADAPAYQQGQNQLYNELNLGRREEYDVLDKRRGRDPEMGGKPRRKNPQEGLYNELQKDKMAEAYSEIGMKGERRRGKGHDGLYQGLSTATKDTYDALHMQALPPR

SEQ ID NO: 817 - DNA, 2202 bp, Artificial Sequence
  source: /note="Description of Artificial Sequence: Synthetic polynucleotide"
atggccctccctgtcaccgccctgctgcttccgctggctcttctgctccacgccgctcggccccagtccgctcttacccaaccggcctcagcctcggggagccccggccagagcgtgaccatttcctgcaccggcacttcatccgacgtgggcggctacaactacgtgtcctggtaccaacagcacccgggaaaggcccccaagctcatgatctacgacgtgtccaacaggccctcgggagtgtccaaccggttctcgggttcgaaatcgggaaacacagccagcctgaccatcagcggactgcaggctgaagatgaagccgactactactgctcctcctacacctcgtcatccacgctctacgtgttcggcactggaactcagctgactgtgctgggcggaggaggctccgaagtgcagcttcaacaatcaggaccaggactcgtcaaaccatcacagaccctctccctcacatgtgccatctccggggactccatgttgagcaattccgacacttggaattggattagacaaagcccgtcccggggtctggaatggttgggacgcacctaccaccggtctacttggtacgacgactacgcgtcatccgtgcggggaagagtgtccatcaacgtggacacctccaagaaccagtacagcctgcagcttaatgccgtgactcctgaggatacgggcgtctactactgcgcccgcgtccgcctgcaagacgggaacagctggagcgatgcattcgatgtctggggccagggaactatggtcaccgtgtcgtctggagggggagggagtgaaattgtgatgacccagtcacccgccactcttagcctttcacccggtgagcgcgcaaccctgtcttgcagagcctcccaagacatctcaaaataccttaattggtatcaacagaagcccggacaggctcctcgccttctgatctaccacaccagccggctccattctggaatccctgccaggttcagcggtagcggatctgggaccgactacaccctcactatcagctcactgcagccagaggacttcgctgtctatttctgtcagcaagggaacaccctgccctacacctttggacagggcaccaagctcgagattaaaggtggaggtggcagcggaggaggtgggtccggcggtggaggaagccaggtccaactccaagaaagcggaccgggtcttgtgaagccatcagaaactctttcactgacttgtactgtgagcggagtgtctctccccgattacggggtgtcttggatcagacagccaccggggaagggtctggaatggattggagtgatttggggctctgagactacttactaccaatcatccctcaagtcacgcgtcaccatctcaaaggacaactctaagaatcaggtgtcactgaaactgtcatctgtgaccgcagccgacaccgccgtgtactattgcgctaagcattactattatggcgggagctacgcaatggattactggggacagggtactctggtcaccgtgtccagcaccactaccccagcaccgaggccacccaccccggctcctaccatcgcctcccagcctctgtccctgcgtccggaggcatgtagacccgcagctggtggggccgtgcatacccggggtcttgacttcgcctgcgatatctacatttgggcccctctggctggtacttgcggggtcctgctgctttcactcgtgatcactctttactgtaagcgcggtcggaagaagctgctgtacatctttaagcaacccttcatgaggcctgtgcagactactcaagaggaggacggctgttcatgccggttcccagaggaggaggaaggcggctgcgaactgcgcgtgaaattcagccgcagcgcagatgctccagcctaccagcaggggcagaaccagctctacaacgaactcaatcttggtcggagagaggagtacgacgtgctggacaagcggagaggacgggacccagaaatgggcgggaagccgcgcagaaagaatccccaagagggcctgtacaacgagctccaaaaggataagatggcagaagcctatagcgagattggtatgaaaggggaacgcagaagaggcaaaggccacgacggactgtaccagggactcagcaccgccaccaaggacacctatgacgctcttcacatgcaggccctgccgcctcgg

SEQ ID NO: 818 - protein, 734 aa, Artificial Sequence
  source: /note="Description of Artificial Sequence: Synthetic polypeptide"
MALPVTALLLPLALLLHAARPQSALTQPASASGSPGQSVTISCTGTSSDVGGYNYVSWYQQHPGKAPKLMIYDVSNRPSGVSNRFSGSKSGNTASLTISGLQAEDEADYYCSSYTSSSTLYVFGTGTQLTVLGGGGSEVQLQQSGPGLVKPSQTLSLTCAISGDSMLSNSDTWNWIRQSPSRGLEWLGRTYHRSTWYDDYASSVRGRVSINVDTSKNQYSLQLNAVTPEDTGVYYCARVRLQDGNSWSDAFDVWGQGTMVTVSSGGGGSEIVMTQSPATLSLSPGERATLSCRASQDISKYLNWYQQKPGQAPRLLIYHTSRLHSGIPARFSGSGSGTDYTLTISSLQPEDFAVYFCQQGNTLPYTFGQGTKLEIKGGGGSGGGGSGGGGSQVQLQESGPGLVKPSETLSLTCTVSGVSLPDYGVSWIRQPPGKGLEWIGVIWGSETTYYQSSLKSRVTISKDNSKNQVSLKLSSVTAADTAVYYCAKHYYYGGSYAMDYWGQGTLVTVSSTTTPAPRPPTPAPTIASQPLSLRPEACRPAAGGAVHTRGLDFACDIYIWAPLAGTCGVLLLSLVITLYCKRGRKKLLYIFKQPFMRPVQTTQEEDGCSCRFPEEEEGGCELRVKFSRSADAPAYQQGQNQLYNELNLGRREEYDVLDKRRGRDPEMGGKPRRKNPQEGLYNELQKDKMAEAYSEIGMKGERRRGKGHDGLYQGLSTATKDTYDALHMQALPPR

SEQ ID NO: 819 - DNA, 2232 bp, Artificial Sequence
  source: /note="Description of Artificial Sequence: Synthetic polynucleotide"
atggccctgcccgtgactgcgctcctgcttccgttggccctgctcctgcatgccgccagacctcagtccgctctgactcagccggcctcagcttcggggtcccctggtcaaagcgtcactatttcctgtaccggaacctcatcagacgtgggcggctacaattacgtgtcctggtaccaacagcaccccggaaaggctcctaagcttatgatctacgacgtgtccaaccggccgtcaggagtgtccaacagattctccggctccaagagcggaaacactgccagcttgaccattagcggcttgcaggccgaggacgaagccgactactactgctctagctacacatcctcgtctaccctctacgtgtttggaacggggacccagctgactgtgctcgggggtggaggatcagaggtgcaactccagcagtccggtcctggcctcgtgaaaccgtcccaaaccctgtccctgacttgcgccatctcgggcgactccatgctgtccaattccgacacctggaactggattagacaatcgcctagccggggactcgaatggctgggccggacctaccaccggtccacgtggtatgacgactacgcaagctccgtccggggaagggtgtccattaacgtcgatacctccaagaaccagtacagccttcagctgaacgctgtgacccccgaggataccggcgtctactactgtgcaagagtgcgattgcaggatggaaactcgtggtcggacgcattcgatgtctggggacagggaactatggtgaccgtgtcctcgggcggaggcgggagcggaggaggaggctctggcggaggaggaagcgagattgtcatgactcagtccccggccacactctccctgtcacccggagaaagagcaaccctgagctgcagggcgtcccaggacatctcgaagtacctgaactggtaccagcagaagcctggacaagcaccccgcctcctgatctaccacacctcgcggctgcattcgggaatccccgccagattctcagggagcggatcaggaaccgactacaccctgactatctcgagcctgcaaccagaggatttcgccgtgtacttctgccagcaaggaaacaccctgccctacacctttggacagggaaccaagctcgagattaaggggggtggtggatcgggagggggtggatcaggaggaggcggctcacaagtccagctgcaagaatccggtccgggacttgtgaagccgtccgaaaccctgtcactgacttgcactgtgtccggggtgtcattgcccgactacggcgtgagctggattcggcagccccctggaaagggattggaatggatcggcgtgatctggggttcggaaactacctactatcagtcctcactgaagtcccgcgtgaccatcagcaaggataattccaaaaaccaagtgtctctgaagctctccagcgtcactgccgccgatactgccgtgtactactgcgccaagcactactattacggcggttcgtacgccatggactactggggccaagggacactcgtgaccgtgtcatccaccactaccccagcaccgaggccacccaccccggctcctaccatcgcctcccagcctctgtccctgcgtccggaggcatgtagacccgcagctggtggggccgtgcatacccggggtcttgacttcgcctgcgatatctacatttgggcccctctggctggtacttgcggggtcctgctgctttcactcgtgatcactctttactgtaagcgcggtcggaagaagctgctgtacatctttaagcaacccttcatgaggcctgtgcagactactcaagaggaggacggctgttcatgccggttcccagaggaggaggaaggcggctgcgaactgcgcgtgaaattcagccgcagcgcagatgctccagcctaccagcaggggcagaaccagctctacaacgaactcaatcttggtcggagagaggagtacgacgtgctggacaagcggagaggacgggacccagaaatgggcgggaagccgcgcagaaagaatccccaagagggcctgtacaacgagctccaaaaggataagatggcagaagcctatagcgagattggtatgaaaggggaacgcagaagaggcaaaggccacgacggactgtaccagggactcagcaccgccaccaaggacacctatgacgctcttcacatgcaggccctgccgcctcgg

SEQ ID NO: 820 - protein, 744 aa, Artificial Sequence
  source: /note="Description of Artificial Sequence: Synthetic polypeptide"
MALPVTALLLPLALLLHAARPQSALTQPASASGSPGQSVTISCTGTSSDVGGYNYVSWYQQHPGKAPKLMIYDVSNRPSGVSNRFSGSKSGNTASLTISGLQAEDEADYYCSSYTSSSTLYVFGTGTQLTVLGGGGSEVQLQQSGPGLVKPSQTLSLTCAISGDSMLSNSDTWNWIRQSPSRGLEWLGRTYHRSTWYDDYASSVRGRVSINVDTSKNQYSLQLNAVTPEDTGVYYCARVRLQDGNSWSDAFDVWGQGTMVTVSSGGGGSGGGGSGGGGSEIVMTQSPATLSLSPGERATLSCRASQDISKYLNWYQQKPGQAPRLLIYHTSRLHSGIPARFSGSGSGTDYTLTISSLQPEDFAVYFCQQGNTLPYTFGQGTKLEIKGGGGSGGGGSGGGGSQVQLQESGPGLVKPSETLSLTCTVSGVSLPDYGVSWIRQPPGKGLEWIGVIWGSETTYYQSSLKSRVTISKDNSKNQVSLKLSSVTAADTAVYYCAKHYYYGGSYAMDYWGQGTLVTVSSTTTPAPRPPTPAPTIASQPLSLRPEACRPAAGGAVHTRGLDFACDIYIWAPLAGTCGVLLLSLVITLYCKRGRKKLLYIFKQPFMRPVQTTQEEDGCSCRFPEEEEGGCELRVKFSRSADAPAYQQGQNQLYNELNLGRREEYDVLDKRRGRDPEMGGKPRRKNPQEGLYNELQKDKMAEAYSEIGMKGERRRGKGHDGLYQGLSTATKDTYDALHMQALPPR

SEQ ID NO: 821 - DNA, 2232 bp, Artificial Sequence
  source: /note="Description of Artificial Sequence: Synthetic polynucleotide"
atggccctgcccgtgactgcgctcctgcttccgttggccctgctcctgcatgccgccagacctcagtccgctctgactcagccggcctcagcttcggggtcccctggtcaaagcgtcactatttcctgtaccggaacctcatcagacgtgggcggctacaattacgtgtcctggtaccaacagcaccccggaaaggctcctaagcttatgatctacgacgtgtccaaccggccgtcaggagtgtccaacagattctccggctccaagagcggaaacactgccagcttgaccattagcggcttgcaggccgaggacgaagccgactactactgctctagctacacatcctcgtctaccctctacgtgtttggaacggggacccagctgactgtgctcgggggtggaggatcagaggtgcaactccagcagtccggtcctggcctcgtgaaaccgtcccaaaccctgtccctgacttgcgccatctcgggcgactccatgctgtccaattccgacacctggaactggattagacaatcgcctagccggggactcgaatggctgggccggacctaccaccggtccacgtggtatgacgactacgcaagctccgtccggggaagggtgtccattaacgtcgatacctccaagaaccagtacagccttcagctgaacgctgtgacccccgaggataccggcgtctactactgtgcaagagtgcgattgcaggatggaaactcgtggtcggacgcattcgatgtctggggacagggaactatggtcactgtgtcctccggcggtggaggctcgggggggggcggctcaggaggaggcggctcacaagtccagctgcaagaatccggtccgggacttgtgaagccgtccgaaaccctgtcactgacttgcactgtgtccggggtgtcattgcccgactacggcgtgagctggattcggcagccccctggaaagggattggaatggatcggcgtgatctggggttcggaaactacctactatcagtcctcactgaagtcccgcgtgaccatcagcaaggataattccaaaaaccaagtgtctctgaagctctccagcgtcactgccgccgatactgccgtgtactactgcgccaagcactactattacggcggttcgtacgccatggactactggggacaaggcactcttgtgactgtgtcaagcggcggtggagggagcggtgggggcggttcaggaggaggcggatcagagatcgtgatgacccaatccccagccaccctgtccctcagccctggagaaagagccaccctgagctgccgggcctcccaggatatcagcaagtacttgaactggtaccaacaaaagccggggcaggcgccccggctcctgatctaccacacctcgcgcctccactcaggtatccccgccagattctcagggagcggctccggtactgactacaccctgactatttcctcactgcagccagaggactttgccgtgtacttctgccagcagggaaacactctgccgtacaccttcgggcagggaacgaagcttgaaattaagaccactaccccagcaccgaggccacccaccccggctcctaccatcgcctcccagcctctgtccctgcgtccggaggcatgtagacccgcagctggtggggccgtgcatacccggggtcttgacttcgcctgcgatatctacatttgggcccctctggctggtacttgcggggtcctgctgctttcactcgtgatcactctttactgtaagcgcggtcggaagaagctgctgtacatctttaagcaacccttcatgaggcctgtgcagactactcaagaggaggacggctgttcatgccggttcccagaggaggaggaaggcggctgcgaactgcgcgtgaaattcagccgcagcgcagatgctccagcctaccagcaggggcagaaccagctctacaacgaactcaatcttggtcggagagaggagtacgacgtgctggacaagcggagaggacgggacccagaaatgggcgggaagccgcgcagaaagaatccccaagagggcctgtacaacgagctccaaaaggataagatggcagaagcctatagcgagattggtatgaaaggggaacgcagaagaggcaaaggccacgacggactgtaccagggactcagcaccgccaccaaggacacctatgacgctcttcacatgcaggccctgccgcctcgg

SEQ ID NO: 822 - protein, 744 aa, Artificial Sequence
  source: /note="Description of Artificial Sequence: Synthetic polypeptide"
MALPVTALLLPLALLLHAARPQSALTQPASASGSPGQSVTISCTGTSSDVGGYNYVSWYQQHPGKAPKLMIYDVSNRPSGVSNRFSGSKSGNTASLTISGLQAEDEADYYCSSYTSSSTLYVFGTGTQLTVLGGGGSEVQLQQSGPGLVKPSQTLSLTCAISGDSMLSNSDTWNWIRQSPSRGLEWLGRTYHRSTWYDDYASSVRGRVSINVDTSKNQYSLQLNAVTPEDTGVYYCARVRLQDGNSWSDAFDVWGQGTMVTVSSGGGGSGGGGSGGGGSQVQLQESGPGLVKPSETLSLTCTVSGVSLPDYGVSWIRQPPGKGLEWIGVIWGSETTYYQSSLKSRVTISKDNSKNQVSLKLSSVTAADTAVYYCAKHYYYGGSYAMDYWGQGTLVTVSSGGGGSGGGGSGGGGSEIVMTQSPATLSLSPGERATLSCRASQDISKYLNWYQQKPGQAPRLLIYHTSRLHSGIPARFSGSGSGTDYTLTISSLQPEDFAVYFCQQGNTLPYTFGQGTKLEIKTTTPAPRPPTPAPTIASQPLSLRPEACRPAAGGAVHTRGLDFACDIYIWAPLAGTCGVLLLSLVITLYCKRGRKKLLYIFKQPFMRPVQTTQEEDGCSCRFPEEEEGGCELRVKFSRSADAPAYQQGQNQLYNELNLGRREEYDVLDKRRGRDPEMGGKPRRKNPQEGLYNELQKDKMAEAYSEIGMKGERRRGKGHDGLYQGLSTATKDTYDALHMQALPPR

SEQ ID NO: 823 - DNA, 2985 bp, Artificial Sequence
  source: /note="Description of Artificial Sequence: Synthetic polynucleotide"
atggccctccctgtcaccgccctgctgcttccgctggctcttctgctccacgccgctcggcccgaagtgcagctgcagcagtcagggcctggcctggtcaagccgtcgcagaccctctccctgacatgcgccattagcggggactccatgctgagcaactcggacacctggaactggattcggcagtccccttcccggggactcgagtggctcggacgcacctaccatcggagcacttggtacgacgactacgcctcctccgtgagaggtcgcgtgtcgatcaacgtggatacctcgaagaaccagtatagcttgcaactgaacgccgtgacccctgaggataccggagtgtactattgtgcgagagtcaggctgcaagacggaaactcctggtccgacgcatttgatgtctggggacagggtactatggtcacggtgtcatctggaggcggaggatcgcaaagcgccctgactcagccggcttcggctagcggttcaccggggcagtccgtgactatctcctgcaccgggacttcctccgacgtgggaggctacaattacgtgtcctggtaccagcaacaccccggcaaagccccaaagctgatgatctacgacgtcagcaacagacccagcggagtgtccaaccggttcagcggctccaagtccggcaacaccgcctccctgaccatcagcgggcttcaggccgaagatgaggcggattactactgctcctcgtacacctcaagctcaactctgtacgtgttcggcaccggtactcagctcaccgtgctgaccactaccccagcaccgaggccacccaccccggctcctaccatcgcctcccagcctctgtccctgcgtccggaggcatgtagacccgcagctggtggggccgtgcatacccggggtcttgacttcgcctgcgatatctacatttgggcccctctggctggtacttgcggggtcctgctgctttcactcgtgatcactctttactgtaagcgcggtcggaagaagctgctgtacatctttaagcaacccttcatgaggcctgtgcagactactcaagaggaggacggctgttcatgccggttcccagaggaggaggaaggcggctgcgaactgcgcgtgaaattcagccgcagcgcagatgctccagcctaccagcaggggcagaaccagctctacaacgaactcaatcttggtcggagagaggagtacgacgtgctggacaagcggagaggacgggacccagaaatgggcgggaagccgcgcagaaagaatccccaagagggcctgtacaacgagctccaaaaggataagatggcagaagcctatagcgagattggtatgaaaggggaacgcagaagaggcaaaggccacgacggactgtaccagggactcagcaccgccaccaaggacacctatgacgctcttcacatgcaggccctgccgcctcggggaagcggagctactaacttcagcctgctgaagcaggctggagacgtggaggagaaccctggacctatggccttaccagtgaccgccttgctcctgccgctggccttgctgctccacgccgccaggccggaaattgtgatgacccagtcacccgccactcttagcctttcacccggtgagcgcgcaaccctgtcttgcagagcctcccaagacatctcaaaataccttaattggtatcaacagaagcccggacaggctcctcgccttctgatctaccacaccagccggctccattctggaatccctgccaggttcagcggtagcggatctgggaccgactacaccctcactatcagctcactgcagccagaggacttcgctgtctatttctgtcagcaagggaacaccctgccctacacctttggacagggcaccaagctcgagattaaaggtggaggtggcagcggaggaggtgggtccggcggtggaggaagccaggtccaactccaagaaagcggaccgggtcttgtgaagccatcagaaactctttcactgacttgtactgtgagcggagtgtctctccccgattacggggtgtcttggatcagacagccaccggggaagggtctggaatggattggagtgatttggggctctgagactacttactaccaatcatccctcaagtcacgcgtcaccatctcaaaggacaactctaagaatcaggtgtcactgaaactgtcatctgtgaccgcagccgacaccgccgtgtactattgcgctaagcattactattatggcgggagctacgcaatggattactggggacagggtactctggtcaccgtgtccagcaccacgacgccagcgccgcgaccaccaacaccggcgcccaccatcgcgtcgcagcccctgtccctgcgcccagaggcgtgccggccagcggcggggggcgcagtgcacacgagggggctggacttcgcctgtgatatctacatctgggcgcccttggccgggacttgtggggtccttctcctgtcactggttatcaccctttactgcaaacggggcagaaagaaactcctgtatatattcaaacaaccatttatgagaccagtacaaactactcaagaggaagatggctgtagctgccgatttccagaagaagaagaaggaggatgtgaactgagagtgaagttcagcaggagcgcagacgcccccgcgtaccagcagggccagaaccagctctataacgagctcaatctaggacgaagagaggagtacgatgttttggacaagagacgtggccgggaccctgagatggggggaaagccgagaaggaagaaccctcaggaaggcctgtacaatgaactgcagaaagataagatggcggaggcctacagtgagattgggatgaaaggcgagcgccggaggggcaaggggcacgatggcctttaccagggtctcagtacagccaccaaggacacctacgacgcccttcacatgcaggccctgccccctcgc

SEQ ID NO: 824 - protein, 995 aa, Artificial Sequence
  source: /note="Description of Artificial Sequence: Synthetic polypeptide"
MALPVTALLLPLALLLHAARPEVQLQQSGPGLVKPSQTLSLTCAISGDSMLSNSDTWNWIRQSPSRGLEWLGRTYHRSTWYDDYASSVRGRVSINVDTSKNQYSLQLNAVTPEDTGVYYCARVRLQDGNSWSDAFDVWGQGTMVTVSSGGGGSQSALTQPASASGSPGQSVTISCTGTSSDVGGYNYVSWYQQHPGKAPKLMIYDVSNRPSGVSNRFSGSKSGNTASLTISGLQAEDEADYYCSSYTSSSTLYVFGTGTQLTVLTTTPAPRPPTPAPTIASQPLSLRPEACRPAAGGAVHTRGLDFACDIYIWAPLAGTCGVLLLSLVITLYCKRGRKKLLYIFKQPFMRPVQTTQEEDGCSCRFPEEEEGGCELRVKFSRSADAPAYQQGQNQLYNELNLGRREEYDVLDKRRGRDPEMGGKPRRKNPQEGLYNELQKDKMAEAYSEIGMKGERRRGKGHDGLYQGLSTATKDTYDALHMQALPPRGSGATNFSLLKQAGDVEENPGPMALPVTALLLPLALLLHAARPEIVMTQSPATLSLSPGERATLSCRASQDISKYLNWYQQKPGQAPRLLIYHTSRLHSGIPARFSGSGSGTDYTLTISSLQPEDFAVYFCQQGNTLPYTFGQGTKLEIKGGGGSGGGGSGGGGSQVQLQESGPGLVKPSETLSLTCTVSGVSLPDYGVSWIRQPPGKGLEWIGVIWGSETTYYQSSLKSRVTISKDNSKNQVSLKLSSVTAADTAVYYCAKHYYYGGSYAMDYWGQGTLVTVSSTTTPAPRPPTPAPTIASQPLSLRPEACRPAAGGAVHTRGLDFACDIYIWAPLAGTCGVLLLSLVITLYCKRGRKKLLYIFKQPFMRPVQTTQEEDGCSCRFPEEEEGGCELRVKFSRSADAPAYQQGQNQLYNELNLGRREEYDVLDKRRGRDPEMGGKPRRKNPQEGLYNELQKDKMAEAYSEIGMKGERRRGKGHDGLYQGLSTATKDTYDALHMQALPPR

SEQ ID NO: 825 - protein, 508 aa, Artificial Sequence
  source: /note="Description of Artificial Sequence: Synthetic polypeptide"
MALPVTALLLPLALLLHAARPEVQLQQSGPGLVKPSQTLSLTCAISGDSMLSNSDTWNWIRQSPSRGLEWLGRTYHRSTWYDDYASSVRGRVSINVDTSKNQYSLQLNAVTPEDTGVYYCARVRLQDGNSWSDAFDVWGQGTMVTVSSGGGGSQSALTQPASASGSPGQSVTISCTGTSSDVGGYNYVSWYQQHPGKAPKLMIYDVSNRPSGVSNRFSGSKSGNTASLTISGLQAEDEADYYCSSYTSSSTLYVFGTGTQLTVLTTTPAPRPPTPAPTIASQPLSLRPEACRPAAGGAVHTRGLDFACDIYIWAPLAGTCGVLLLSLVITLYCKRGRKKLLYIFKQPFMRPVQTTQEEDGCSCRFPEEEEGGCELRVKFSRSADAPAYQQGQNQLYNELNLGRREEYDVLDKRRGRDPEMGGKPRRKNPQEGLYNELQKDKMAEAYSEIGMKGERRRGKGHDGLYQGLSTATKDTYDALHMQALPPRGSGATNFSLLKQAGDVEENPG

SEQ ID NO: 826 - protein, 487 aa, Artificial Sequence
  source: /note="Description of Artificial Sequence: Synthetic polypeptide"
PMALPVTALLLPLALLLHAARPEIVMTQSPATLSLSPGERATLSCRASQDISKYLNWYQQKPGQAPRLLIYHTSRLHSGIPARFSGSGSGTDYTLTISSLQPEDFAVYFCQQGNTLPYTFGQGTKLEIKGGGGSGGGGSGGGGSQVQLQESGPGLVKPSETLSLTCTVSGVSLPDYGVSWIRQPPGKGLEWIGVIWGSETTYYQSSLKSRVTISKDNSKNQVSLKLSSVTAADTAVYYCAKHYYYGGSYAMDYWGQGTLVTVSSTTTPAPRPPTPAPTIASQPLSLRPEACRPAAGGAVHTRGLDFACDIYIWAPLAGTCGVLLLSLVITLYCKRGRKKLLYIFKQPFMRPVQTTQEEDGCSCRFPEEEEGGCELRVKFSRSADAPAYQQGQNQLYNELNLGRREEYDVLDKRRGRDPEMGGKPRRKNPQEGLYNELQKDKMAEAYSEIGMKGERRRGKGHDGLYQGLSTATKDTYDALHMQALPPR

SEQ ID NO: 827 - DNA, 2985 bp, Artificial Sequence
  source: /note="Description of Artificial Sequence: Synthetic polynucleotide"
atggccttaccagtgaccgccttgctcctgccgctggccttgctgctccacgccgccaggccggaaattgtgatgacccagtcacccgccactcttagcctttcacccggtgagcgcgcaaccctgtcttgcagagcctcccaagacatctcaaaataccttaattggtatcaacagaagcccggacaggctcctcgccttctgatctaccacaccagccggctccattctggaatccctgccaggttcagcggtagcggatctgggaccgactacaccctcactatcagctcactgcagccagaggacttcgctgtctatttctgtcagcaagggaacaccctgccctacacctttggacagggcaccaagctcgagattaaaggtggaggtggcagcggaggaggtgggtccggcggtggaggaagccaggtccaactccaagaaagcggaccgggtcttgtgaagccatcagaaactctttcactgacttgtactgtgagcggagtgtctctccccgattacggggtgtcttggatcagacagccaccggggaagggtctggaatggattggagtgatttggggctctgagactacttactaccaatcatccctcaagtcacgcgtcaccatctcaaaggacaactctaagaatcaggtgtcactgaaactgtcatctgtgaccgcagccgacaccgccgtgtactattgcgctaagcattactattatggcgggagctacgcaatggattactggggacagggtactctggtcaccgtgtccagcaccacgacgccagcgccgcgaccaccaacaccggcgcccaccatcgcgtcgcagcccctgtccctgcgcccagaggcgtgccggccagcggcggggggcgcagtgcacacgagggggctggacttcgcctgtgatatctacatctgggcgcccttggccgggacttgtggggtccttctcctgtcactggttatcaccctttactgcaaacggggcagaaagaaactcctgtatatattcaaacaaccatttatgagaccagtacaaactactcaagaggaagatggctgtagctgccgatttccagaagaagaagaaggaggatgtgaactgagagtgaagttcagcaggagcgcagacgcccccgcgtaccagcagggccagaaccagctctataacgagctcaatctaggacgaagagaggagtacgatgttttggacaagagacgtggccgggaccctgagatggggggaaagccgagaaggaagaaccctcaggaaggcctgtacaatgaactgcagaaagataagatggcggaggcctacagtgagattgggatgaaaggcgagcgccggaggggcaaggggcacgatggcctttaccagggtctcagtacagccaccaaggacacctacgacgcccttcacatgcaggccctgccccctcgcggaagcggagctactaacttcagcctgctgaagcaggctggagacgtggaggagaaccctggacctatggccctccctgtcaccgccctgctgcttccgctggctcttctgctccacgccgctcggcccgaagtgcagctgcagcagtcagggcctggcctggtcaagccgtcgcagaccctctccctgacatgcgccattagcggggactccatgctgagcaactcggacacctggaactggattcggcagtccccttcccggggactcgagtggctcggacgcacctaccatcggagcacttggtacgacgactacgcctcctccgtgagaggtcgcgtgtcgatcaacgtggatacctcgaagaaccagtatagcttgcaactgaacgccgtgacccctgaggataccggagtgtactattgtgcgagagtcaggctgcaagacggaaactcctggtccgacgcatttgatgtctggggacagggtactatggtcacggtgtcatctggaggcggaggatcgcaaagcgccctgactcagccggcttcggctagcggttcaccggggcagtccgtgactatctcctgcaccgggacttcctccgacgtgggaggctacaattacgtgtcctggtaccagcaacaccccggcaaagccccaaagctgatgatctacgacgtcagcaacagacccagcggagtgtccaaccggttcagcggctccaagtccggcaacaccgcctccctgaccatcagcgggcttcaggccgaagatgaggcggattactactgctcctcgtacacctcaagctcaactctgtacgtgttcggcaccggtactcagctcaccgtgctgaccactaccccagcaccgaggccacccaccccggctcctaccatcgcctcccagcctctgtccctgcgtccggaggcatgtagacccgcagctggtggggccgtgcatacccggggtcttgacttcgcctgcgatatctacatttgggcccctctggctggtacttgcggggtcctgctgctttcactcgtgatcactctttactgtaagcgcggtcggaagaagctgctgtacatctttaagcaacccttcatgaggcctgtgcagactactcaagaggaggacggctgttcatgccggttcccagaggaggaggaaggcggctgcgaactgcgcgtgaaattcagccgcagcgcagatgctccagcctaccagcaggggcagaaccagctctacaacgaactcaatcttggtcggagagaggagtacgacgtgctggacaagcggagaggacgggacccagaaatgggcgggaagccgcgcagaaagaatccccaagagggcctgtacaacgagctccaaaaggataagatggcagaagcctatagcgagattggtatgaaaggggaacgcagaagaggcaaaggccacgacggactgtaccagggactcagcaccgccaccaaggacacctatgacgctcttcacatgcaggccctgccgcctcgg

SEQ ID NO: 828 - protein, 995 aa, Artificial Sequence
  source: /note="Description of Artificial Sequence: Synthetic polypeptide"
MALPVTALLLPLALLLHAARPEIVMTQSPATLSLSPGERATLSCRASQDISKYLNWYQQKPGQAPRLLIYHTSRLHSGIPARFSGSGSGTDYTLTISSLQPEDFAVYFCQQGNTLPYTFGQGTKLEIKGGGGSGGGGSGGGGSQVQLQESGPGLVKPSETLSLTCTVSGVSLPDYGVSWIRQPPGKGLEWIGVIWGSETTYYQSSLKSRVTISKDNSKNQVSLKLSSVTAADTAVYYCAKHYYYGGSYAMDYWGQGTLVTVSSTTTPAPRPPTPAPTIASQPLSLRPEACRPAAGGAVHTRGLDFACDIYIWAPLAGTCGVLLLSLVITLYCKRGRKKLLYIFKQPFMRPVQTTQEEDGCSCRFPEEEEGGCELRVKFSRSADAPAYQQGQNQLYNELNLGRREEYDVLDKRRGRDPEMGGKPRRKNPQEGLYNELQKDKMAEAYSEIGMKGERRRGKGHDGLYQGLSTATKDTYDALHMQALPPRGSGATNFSLLKQAGDVEENPGPMALPVTALLLPLALLLHAARPEVQLQQSGPGLVKPSQTLSLTCAISGDSMLSNSDTWNWIRQSPSRGLEWLGRTYHRSTWYDDYASSVRGRVSINVDTSKNQYSLQLNAVTPEDTGVYYCARVRLQDGNSWSDAFDVWGQGTMVTVSSGGGGSQSALTQPASASGSPGQSVTISCTGTSSDVGGYNYVSWYQQHPGKAPKLMIYDVSNRPSGVSNRFSGSKSGNTASLTISGLQAEDEADYYCSSYTSSSTLYVFGTGTQLTVLTTTPAPRPPTPAPTIASQPLSLRPEACRPAAGGAVHTRGLDFACDIYIWAPLAGTCGVLLLSLVITLYCKRGRKKLLYIFKQPFMRPVQTTQEEDGCSCRFPEEEEGGCELRVKFSRSADAPAYQQGQNQLYNELNLGRREEYDVLDKRRGRDPEMGGKPRRKNPQEGLYNELQKDKMAEAYSEIGMKGERRRGKGHDGLYQGLSTATKDTYDALHMQALPPR

SEQ ID NO: 829 - protein, 507 aa, Artificial Sequence
  source: /note="Description of Artificial Sequence: Synthetic polypeptide"
MALPVTALLLPLALLLHAARPEIVMTQSPATLSLSPGERATLSCRASQDISKYLNWYQQKPGQAPRLLIYHTSRLHSGIPARFSGSGSGTDYTLTISSLQPEDFAVYFCQQGNTLPYTFGQGTKLEIKGGGGSGGGGSGGGGSQVQLQESGPGLVKPSETLSLTCTVSGVSLPDYGVSWIRQPPGKGLEWIGVIWGSETTYYQSSLKSRVTISKDNSKNQVSLKLSSVTAADTAVYYCAKHYYYGGSYAMDYWGQGTLVTVSSTTTPAPRPPTPAPTIASQPLSLRPEACRPAAGGAVHTRGLDFACDIYIWAPLAGTCGVLLLSLVITLYCKRGRKKLLYIFKQPFMRPVQTTQEEDGCSCRFPEEEEGGCELRVKFSRSADAPAYQQGQNQLYNELNLGRREEYDVLDKRRGRDPEMGGKPRRKNPQEGLYNELQKDKMAEAYSEIGMKGERRRGKGHDGLYQGLSTATKDTYDALHMQALPPRGSGATNFSLLKQAGDVEENPG

SEQ ID NO: 830 - protein, 488 aa, Artificial Sequence
  source: /note="Description of Artificial Sequence: Synthetic polypeptide"
PMALPVTALLLPLALLLHAARPEVQLQQSGPGLVKPSQTLSLTCAISGDSMLSNSDTWNWIRQSPSRGLEWLGRTYHRSTWYDDYASSVRGRVSINVDTSKNQYSLQLNAVTPEDTGVYYCARVRLQDGNSWSDAFDVWGQGTMVTVSSGGGGSQSALTQPASASGSPGQSVTISCTGTSSDVGGYNYVSWYQQHPGKAPKLMIYDVSNRPSGVSNRFSGSKSGNTASLTISGLQAEDEADYYCSSYTSSSTLYVFGTGTQLTVLTTTPAPRPPTPAPTIASQPLSLRPEACRPAAGGAVHTRGLDFACDIYIWAPLAGTCGVLLLSLVITLYCKRGRKKLLYIFKQPFMRPVQTTQEEDGCSCRFPEEEEGGCELRVKFSRSADAPAYQQGQNQLYNELNLGRREEYDVLDKRRGRDPEMGGKPRRKNPQEGLYNELQKDKMAEAYSEIGMKGERRRGKGHDGLYQGLSTATKDTYDALHMQALPPR

SEQ ID NO: 831 - DNA, 2985 bp, Artificial Sequence
  source: /note="Description of Artificial Sequence: Synthetic polynucleotide"
atggcacttcccgtcaccgccctgctgctcccactcgccctccttctgcacgccgcccgccccgaagtgcagctgcagcagtcaggaccgggcctggtcaaaccttcgcagactctgtccctgacttgcgctataagcggggactccatgctgagcaattcggacacttggaactggattcgccaaagccccagccggggtctggaatggctgggaaggacctaccatcgctctacttggtacgacgactacgccagctccgtgcgaggacgcgtgtccatcaacgtggacacctccaagaaccagtactcgcttcaactcaacgcagtgacccctgaagataccggagtctactattgcgcccgcgtgcggctccaggacgggaactcctggtcggacgctttcgatgtctggggacagggcactatggtcaccgtcagctccggcggcggcggtagccaatcggcgctgacacagccggcttccgcctcgggatcgcctggacagtcggtgaccatctcgtgcactggaacctcctccgacgtgggcggctacaattatgtgtcatggtaccagcagcacccgggaaaggcccctaagctgatgatctacgacgtgtccaatagacctagcggggtgtcaaacagattctccggatccaaatccggaaacactgcctccctgaccatttccggactgcaggccgaggacgaagccgattactactgctcctcttacacctcctcatccaccctctacgtgtttgggactgggacccagctgaccgtcctcactaccaccccggccccgcggccccctacaccggcaccgactattgccagccagcctctctcgctgcggccggaggcctgccgcccagccgccggcggagccgtgcacacccgcggtctggacttcgcgtgcgatatctacatctgggctccgctggccgggacttgtggcgtgctgctgctgtctctggtcatcacactgtactgcaagcgcggaagaaagaagctgctctacatcttcaagcaacccttcatgcggcctgtgcagaccacccaggaagaggatggctgctcctgccggttcccggaggaagaagagggcggatgcgaactgcgcgtgaagttcagccgaagcgccgacgccccggcctaccagcagggccagaaccaactgtacaacgaactcaacctgggtcggagagaagagtacgacgtgctggacaaaagacgcggcagggaccccgagatgggcggaaagcctcgccgcaagaacccgcaggagggcctctacaacgagctgcagaaggacaagatggccgaagcctactcagagatcggcatgaagggggagcggaggcgcgggaagggccacgacggtttgtaccaaggactttccactgcgaccaaggacacctacgatgccctccatatgcaagccctgccgccccggggttccggagctaccaacttctcgctgttgaagcaggccggagatgtcgaggaaaacccgggacctatggccctgccagtgaccgcgctcctgctgcccctggctctgctgcttcacgcggcccggcctgagattgtgatgactcagagcccggcgaccctgtccctgtcccccggggagagagcaaccctgtcgtgccgggcctcccaagacatctcaaagtacctcaattggtatcagcagaagccaggacaggctccacggttgctgatctaccacacttcgagactgcactcaggaatccccgcgcggttttccggttccggctccgggaccgactacaccctgaccatcagctcgctccagcctgaggatttcgcagtgtacttctgtcagcaaggaaacacccttccatacaccttcggacagggtaccaagctggaaatcaagggaggaggaggatctgggggcggtggttccggaggcggtggaagccaagtgcagctccaggaaagcggacccgggctggtcaagccgagcgaaaccctctcactgacttgtactgtgtccggagtgtccctgcctgactatggagtgtcctggatccgacagccccccggaaagggtctggagtggattggggtcatctggggctccgaaactacctactaccagagcagcctcaagagccgggtcaccatttcaaaggataactccaagaatcaagtgtccctgaagctgtcctcagtgacagccgcagacaccgccgtgtactactgcgccaagcactactactacggaggctcctacgcaatggactactggggacaaggcactttggtcactgtgtcaagcaccaccacccctgcgcctcggcctcctaccccggctcccactatcgcgagccagccgctgagcctgcggcctgaggcttgccgaccggccgctggcggcgccgtgcatactcggggcctcgactttgcctgtgacatctacatctgggcccccctggccggaacgtgcggagtgctgctgctgtcgctggtcattaccctgtattgcaaacgcggaaggaagaagctgttgtacattttcaagcagcccttcatgcgcccggtgcaaactactcaggaggaagatggctgttcctgtcggttccccgaagaggaagaaggcggctgcgagttgagggtcaagttctcccggtccgccgatgctcccgcctaccaacaggggcagaaccagctttataacgaactgaacctgggcaggagggaggaatatgatgtgttggataagcgccggggccgggacccagaaatggggggaaagcccagaagaaagaaccctcaagagggactttacaacgaattgcagaaagacaaaatggccgaggcctactccgagattgggatgaagggcgaaagacggagaggaaaggggcacgacgggctctaccagggactcagcaccgccaccaaagatacctacgacgccctgcatatgcaggcgctgccgccgcgc

SEQ ID NO: 832 - protein, 9 aa, Artificial Sequence
  source: /note="Description of Artificial Sequence: Synthetic peptide"
GDSMLSNSD

SEQ ID NO: 833 - protein, 7 aa, Artificial Sequence
  source: /note="Description of Artificial Sequence: Synthetic peptide"
YHRSTWY

SEQ ID NO: 834 - protein, 10 aa, Artificial Sequence
  source: /note="Description of Artificial Sequence: Synthetic peptide"
GDSMLSNSDT

SEQ ID NO: 835 - protein, 9 aa, Artificial Sequence
  source: /note="Description of Artificial Sequence: Synthetic peptide"
TYHRSTWYD

SEQ ID NO: 836 - protein, 17 aa, Artificial Sequence
  source: /note="Description of Artificial Sequence: Synthetic peptide"
ARVRLQDGNSWSDAFDV

SEQ ID NO: 837 - protein, 10 aa, Artificial Sequence
  source: /note="Description of Artificial Sequence: Synthetic peptide"
GVSLPDYGVS

SEQ ID NO: 838 - protein, 16 aa, Artificial Sequence
  source: /note="Description of Artificial Sequence: Synthetic peptide"
VIWGSETTYYSSSLKS

SEQ ID NO: 839 - protein, 16 aa, Artificial Sequence
  source: /note="Description of Artificial Sequence: Synthetic peptide"
VIWGSETTYYNSSLKS

SEQ ID NO: 840 - DNA, 726 bp, Artificial Sequence
  source: /note="Description of Artificial Sequence: Synthetic polynucleotide"
gaaattgtgatgacccagtcacccgccactcttagcctttcacccggtgagcgcgcaaccctgtcttgcagagcctcccaagacatctcaaaataccttaattggtatcaacagaagcccggacaggctcctcgccttctgatctaccacaccagccggctccattctggaatccctgccaggttcagcggtagcggatctgggaccgactacaccctcactatcagctcactgcagccagaggacttcgctgtctatttctgtcagcaagggaacaccctgccctacacctttggacagggcaccaagctcgagattaaaggtggaggtggcagcggaggaggtgggtccggcggtggaggaagccaggtccaactccaagaaagcggaccgggtcttgtgaagccatcagaaactctttcactgacttgtactgtgagcggagtgtctctccccgattacggggtgtcttggatcagacagccaccggggaagggtctggaatggattggagtgatttggggctctgagactacttactaccaatcatccctcaagtcacgcgtcaccatctcaaaggacaactctaagaatcaggtgtcactgaaactgtcatctgtgaccgcagccgacaccgccgtgtactattgcgctaagcattactattatggcgggagctacgcaatggattactggggacagggtactctggtcaccgtgtccagc

SEQ ID NO: 841 - DNA, 726 bp, Artificial Sequence
  source: /note="Description of Artificial Sequence: Synthetic polynucleotide"
gagattgtcatgactcagtccccggccacactctccctgtcacccggagaaagagcaaccctgagctgcagggcgtcccaggacatctcgaagtacctgaactggtaccagcagaagcctggacaagcaccccgcctcctgatctaccacacctcgcggctgcattcgggaatccccgccagattctcagggagcggatcaggaaccgactacaccctgactatctcgagcctgcaaccagaggatttcgccgtgtacttctgccagcaaggaaacaccctgccctacacctttggacagggaaccaagctcgagattaaggggggtggtggatcgggagggggtggatcaggaggaggcggctcacaagtccagctgcaagaatccggtccgggacttgtgaagccgtccgaaaccctgtcactgacttgcactgtgtccggggtgtcattgcccgactacggcgtgagctggattcggcagccccctggaaagggattggaatggatcggcgtgatctggggttcggaaactacctactatcagtcctcactgaagtcccgcgtgaccatcagcaaggataattccaaaaaccaagtgtctctgaagctctccagcgtcactgccgccgatactgccgtgtactactgcgccaagcactactattacggcggttcgtacgccatggactactggggccaagggacactcgtgaccgtgtcatcc

SEQ ID NO: 842 - DNA, 726 bp, Artificial Sequence
  source: /note="Description of Artificial Sequence: Synthetic polynucleotide"
caagtccagctgcaagaatccggtccgggacttgtgaagccgtccgaaaccctgtcactgacttgcactgtgtccggggtgtcattgcccgactacggcgtgagctggattcggcagccccctggaaagggattggaatggatcggcgtgatctggggttcggaaactacctactatcagtcctcactgaagtcccgcgtgaccatcagcaaggataattccaaaaaccaagtgtctctgaagctctccagcgtcactgccgccgatactgccgtgtactactgcgccaagcactactattacggcggttcgtacgccatggactactggggacaaggcactcttgtgactgtgtcaagcggcggtggagggagcggtgggggcggttcaggaggaggcggatcagagatcgtgatgacccaatccccagccaccctgtccctcagccctggagaaagagccaccctgagctgccgggcctcccaggatatcagcaagtacttgaactggtaccaacaaaagccggggcaggcgccccggctcctgatctaccacacctcgcgcctccactcaggtatccccgccagattctcagggagcggctccggtactgactacaccctgactatttcctcactgcagccagaggactttgccgtgtacttctgccagcagggaaacactctgccgtacaccttcgggcagggaacgaagcttgaaattaag

SEQ ID NO: 843 - protein, 242 aa, Artificial Sequence
  source: /note="Description of Artificial Sequence: Synthetic polypeptide"
QVQLQESGPGLVKPSETLSLTCTVSGVSLPDYGVSWIRQPPGKGLEWIGVIWGSETTYYQSSLKSRVTISKDNSKNQVSLKLSSVTAADTAVYYCAKHYYYGGSYAMDYWGQGTLVTVSSGGGGSGGGGSGGGGSEIVMTQSPATLSLSPGERATLSCRASQDISKYLNWYQQKPGQAPRLLIYHTSRLHSGIPARFSGSGSGTDYTLTISSLQPEDFAVYFCQQGNTLPYTFGQGTKLEIK

SEQ ID NO: 844 - DNA, 726 bp, Artificial Sequence
  source: /note="Description of Artificial Sequence: Synthetic polynucleotide"
gagattgtgatgactcagagcccggcgaccctgtccctgtcccccggggagagagcaaccctgtcgtgccgggcctcccaagacatctcaaagtacctcaattggtatcagcagaagccaggacaggctccacggttgctgatctaccacacttcgagactgcactcaggaatccccgcgcggttttccggttccggctccgggaccgactacaccctgaccatcagctcgctccagcctgaggatttcgcagtgtacttctgtcagcaaggaaacacccttccatacaccttcggacagggtaccaagctggaaatcaagggaggaggaggatctgggggcggtggttccggaggcggtggaagccaagtgcagctccaggaaagcggacccgggctggtcaagccgagcgaaaccctctcactgacttgtactgtgtccggagtgtccctgcctgactatggagtgtcctggatccgacagccccccggaaagggtctggagtggattggggtcatctggggctccgaaactacctactaccagagcagcctcaagagccgggtcaccatttcaaaggataactccaagaatcaagtgtccctgaagctgtcctcagtgacagccgcagacaccgccgtgtactactgcgccaagcactactactacggaggctcctacgcaatggactactggggacaaggcactttggtcactgtgtcaagc

SEQ ID NO: 845 - DNA, 729 bp, Artificial Sequence
  source: /note="Description of Artificial Sequence: Synthetic polynucleotide"
gaagtgcagctgcagcagtcagggcctggcctggtcaagccgtcgcagaccctctccctgacatgcgccattagcggggactccatgctgagcaactcggacacctggaactggattcggcagtccccttcccggggactcgagtggctcggacgcacctaccatcggagcacttggtacgacgactacgcctcctccgtgagaggtcgcgtgtcgatcaacgtggatacctcgaagaaccagtatagcttgcaactgaacgccgtgacccctgaggataccggagtgtactattgtgcgagagtcaggctgcaagacggaaactcctggtccgacgcatttgatgtctggggacagggtactatggtcacggtgtcatctggaggcggaggatcgcaaagcgccctgactcagccggcttcggctagcggttcaccggggcagtccgtgactatctcctgcaccgggacttcctccgacgtgggaggctacaattacgtgtcctggtaccagcaacaccccggcaaagccccaaagctgatgatctacgacgtcagcaacagacccagcggagtgtccaaccggttcagcggctccaagtccggcaacaccgcctccctgaccatcagcgggcttcaggccgaagatgaggcggattactactgctcctcgtacacctcaagctcaactctgtacgtgttcggcaccggtactcagctcaccgtgctg

SEQ ID NO: 846 - protein, 243 aa, Artificial Sequence
  source: /note="Description of Artificial Sequence: Synthetic polypeptide"
EVQLQQSGPGLVKPSQTLSLTCAISGDSMLSNSDTWNWIRQSPSRGLEWLGRTYHRSTWYDDYASSVRGRVSINVDTSKNQYSLQLNAVTPEDTGVYYCARVRLQDGNSWSDAFDVWGQGTMVTVSSGGGGSQSALTQPASASGSPGQSVTISCTGTSSDVGGYNYVSWYQQHPGKAPKLMIYDVSNRPSGVSNRFSGSKSGNTASLTISGLQAEDEADYYCSSYTSSSTLYVFGTGTQLTVL

SEQ ID NO: 847 - DNA, 729 bp, Artificial Sequence
  source: /note="Description of Artificial Sequence: Synthetic polynucleotide"
gaagtgcagctgcagcagtcaggaccgggcctggtcaaaccttcgcagactctgtccctgacttgcgctataagcggggactccatgctgagcaattcggacacttggaactggattcgccaaagccccagccggggtctggaatggctgggaaggacctaccatcgctctacttggtacgacgactacgccagctccgtgcgaggacgcgtgtccatcaacgtggacacctccaagaaccagtactcgcttcaactcaacgcagtgacccctgaagataccggagtctactattgcgcccgcgtgcggctccaggacgggaactcctggtcggacgctttcgatgtctggggacagggcactatggtcaccgtcagctccggcggcggcggtagccaatcggcgctgacacagccggcttccgcctcgggatcgcctggacagtcggtgaccatctcgtgcactggaacctcctccgacgtgggcggctacaattatgtgtcatggtaccagcagcacccgggaaaggcccctaagctgatgatctacgacgtgtccaatagacctagcggggtgtcaaacagattctccggatccaaatccggaaacactgcctccctgaccatttccggactgcaggccgaggacgaagccgattactactgctcctcttacacctcctcatccaccctctacgtgtttgggactgggacccagctgaccgtcctc

SEQ ID NO: 848 - DNA, 759 bp, Artificial Sequence
  source: /note="Description of Artificial Sequence: Synthetic polynucleotide"
gaagtgcagcttcaacaatcaggaccaggactcgtcaaaccatcacagaccctctccctcacatgtgccatctccggggactccatgttgagcaattccgacacttggaattggattagacaaagcccgtcccggggtctggaatggttgggacgcacctaccaccggtctacttggtacgacgactacgcgtcatccgtgcggggaagagtgtccatcaacgtggacacctccaagaaccagtacagcctgcagcttaatgccgtgactcctgaggatacgggcgtctactactgcgcccgcgtccgcctgcaagacgggaacagctggagcgatgcattcgatgtctggggccagggaactatggtcaccgtgtcgtctgggggcggtggatcgggtggcgggggttcggggggcggcggctctcagtccgctcttacccaaccggcctcagcctcggggagccccggccagagcgtgaccatttcctgcaccggcacttcatccgacgtgggcggctacaactacgtgtcctggtaccaacagcacccgggaaaggcccccaagctcatgatctacgacgtgtccaacaggccctcgggagtgtccaaccggttctcgggttcgaaatcgggaaacacagccagcctgaccatcagcggactgcaggctgaagatgaagccgactactactgctcctcctacacctcgtcatccacgctctacgtgttcggcactggaactcagctgactgtgctg

SEQ ID NO: 849 - DNA, 729 bp, Artificial Sequence
  source: /note="Description of Artificial Sequence: Synthetic polynucleotide"
cagtccgctcttacccaaccggcctcagcctcggggagccccggccagagcgtgaccatttcctgcaccggcacttcatccgacgtgggcggctacaactacgtgtcctggtaccaacagcacccgggaaaggcccccaagctcatgatctacgacgtgtccaacaggccctcgggagtgtccaaccggttctcgggttcgaaatcgggaaacacagccagcctgaccatcagcggactgcaggctgaagatgaagccgactactactgctcctcctacacctcgtcatccacgctctacgtgttcggcactggaactcagctgactgtgctgggcggaggaggctccgaagtgcagcttcaacaatcaggaccaggactcgtcaaaccatcacagaccctctccctcacatgtgccatctccggggactccatgttgagcaattccgacacttggaattggattagacaaagcccgtcccggggtctggaatggttgggacgcacctaccaccggtctacttggtacgacgactacgcgtcatccgtgcggggaagagtgtccatcaacgtggacacctccaagaaccagtacagcctgcagcttaatgccgtgactcctgaggatacgggcgtctactactgcgcccgcgtccgcctgcaagacgggaacagctggagcgatgcattcgatgtctggggccagggaactatggtcaccgtgtcgtct

SEQ ID NO: 850 - protein, 243 aa, Artificial Sequence
  source: /note="Description of Artificial Sequence: Synthetic polypeptide"
QSALTQPASASGSPGQSVTISCTGTSSDVGGYNYVSWYQQHPGKAPKLMIYDVSNRPSGVSNRFSGSKSGNTASLTISGLQAEDEADYYCSSYTSSSTLYVFGTGTQLTVLGGGGSEVQLQQSGPGLVKPSQTLSLTCAISGDSMLSNSDTWNWIRQSPSRGLEWLGRTYHRSTWYDDYASSVRGRVSINVDTSKNQYSLQLNAVTPEDTGVYYCARVRLQDGNSWSDAFDVWGQGTMVTVSS

SEQ ID NO: 851 - DNA, 729 bp, Artificial Sequence
  source: /note="Description of Artificial Sequence: Synthetic polynucleotide"
cagtccgctctgactcagccggcctcagcttcggggtcccctggtcaaagcgtcactatttcctgtaccggaacctcatcagacgtgggcggctacaattacgtgtcctggtaccaacagcaccccggaaaggctcctaagcttatgatctacgacgtgtccaaccggccgtcaggagtgtccaacagattctccggctccaagagcggaaacactgccagcttgaccattagcggcttgcaggccgaggacgaagccgactactactgctctagctacacatcctcgtctaccctctacgtgtttggaacggggacccagctgactgtgctcgggggtggaggatcagaggtgcaactccagcagtccggtcctggcctcgtgaaaccgtcccaaaccctgtccctgacttgcgccatctcgggcgactccatgctgtccaattccgacacctggaactggattagacaatcgcctagccggggactcgaatggctgggccggacctaccaccggtccacgtggtatgacgactacgcaagctccgtccggggaagggtgtccattaacgtcgatacctccaagaaccagtacagccttcagctgaacgctgtgacccccgaggataccggcgtctactactgtgcaagagtgcgattgcaggatggaaactcgtggtcggacgcattcgatgtctggggacagggaactatggtgaccgtgtcctcg

SEQ ID NO: 852 - DNA, 729 bp, Artificial Sequence
  source: /note="Description of Artificial Sequence: Synthetic polynucleotide"
cagtccgctctgactcagccggcctcagcttcggggtcccctggtcaaagcgtcactatttcctgtaccggaacctcatcagacgtgggcggctacaattacgtgtcctggtaccaacagcaccccggaaaggctcctaagcttatgatctacgacgtgtccaaccggccgtcaggagtgtccaacagattctccggctccaagagcggaaacactgccagcttgaccattagcggcttgcaggccgaggacgaagccgactactactgctctagctacacatcctcgtctaccctctacgtgtttggaacggggacccagctgactgtgctcgggggtggaggatcagaggtgcaactccagcagtccggtcctggcctcgtgaaaccgtcccaaaccctgtccctgacttgcgccatctcgggcgactccatgctgtccaattccgacacctggaactggattagacaatcgcctagccggggactcgaatggctgggccggacctaccaccggtccacgtggtatgacgactacgcaagctccgtccggggaagggtgtccattaacgtcgatacctccaagaaccagtacagccttcagctgaacgctgtgacccccgaggataccggcgtctactactgtgcaagagtgcgattgcaggatggaaactcgtggtcggacgcattcgatgtctggggacagggaactatggtcactgtgtcctcc

SEQ ID NO: 853 - DNA, 63 bp, Artificial Sequence
  source: /note="Description of Artificial Sequence: Synthetic oligonucleotide"
atggccctccctgtcaccgccctgctgcttccgctggctcttctgctccacgccgctcggccc

SEQ ID NO: 854 - DNA, 63 bp, Artificial Sequence
  source: /note="Description of Artificial Sequence: Synthetic oligonucleotide"
atggccctgcccgtgactgcgctcctgcttccgttggccctgctcctgcatgccgccagacct

SEQ ID NO: 855 - DNA, 63 bp, Artificial Sequence
  source: /note="Description of Artificial Sequence: Synthetic oligonucleotide"
atggccttaccagtgaccgccttgctcctgccgctggccttgctgctccacgccgccaggccg

SEQ ID NO: 856 - DNA, 63 bp, Artificial Sequence
  source: /note="Description of Artificial Sequence: Synthetic oligonucleotide"
atggcacttcccgtcaccgccctgctgctcccactcgccctccttctgcacgccgcccgcccc

SEQ ID NO: 857 - DNA, 63 bp, Artificial Sequence
  source: /note="Description of Artificial Sequence: Synthetic oligonucleotide"
atggccctgccagtgaccgcgctcctgctgcccctggctctgctgcttcacgcggcccggcct

SEQ ID NO: 858 - DNA, 207 bp, Artificial Sequence
  source: /note="Description of Artificial Sequence: Synthetic polynucleotide"
accactaccccagcaccgaggccacccaccccggctcctaccatcgcctcccagcctctgtccctgcgtccggaggcatgtagacccgcagctggtggggccgtgcatacccggggtcttgacttcgcctgcgatatctacatttgggcccctctggctggtacttgcggggtcctgctgctttcactcgtgatcactctttactgt

SEQ ID NO: 859 - DNA, 207 bp, Artificial Sequence
  source: /note="Description of Artificial Sequence: Synthetic polynucleotide"
actaccaccccggccccgcggccccctacaccggcaccgactattgccagccagcctctctcgctgcggccggaggcctgccgcccagccgccggcggagccgtgcacacccgcggtctggacttcgcgtgcgatatctacatctgggctccgctggccgggacttgtggcgtgctgctgctgtctctggtcatcacactgtactgc

SEQ ID NO: 860 - DNA, 207 bp, Artificial Sequence
  source: /note="Description of Artificial Sequence: Synthetic polynucleotide"
accacgacgccagcgccgcgaccaccaacaccggcgcccaccatcgcgtcgcagcccctgtccctgcgcccagaggcgtgccggccagcggcggggggcgcagtgcacacgagggggctggacttcgcctgtgatatctacatctgggcgcccttggccgggacttgtggggtccttctcctgtcactggttatcaccctttactgc

SEQ ID NO: 861 - DNA, 207 bp, Artificial Sequence
  source: /note="Description of Artificial Sequence: Synthetic polynucleotide"
accaccacccctgcgcctcggcctcctaccccggctcccactatcgcgagccagccgctgagcctgcggcctgaggcttgccgaccggccgctggcggcgccgtgcatactcggggcctcgactttgcctgtgacatctacatctgggcccccctggccggaacgtgcggagtgctgctgctgtcgctggtcattaccctgtattgc

SEQ ID NO: 862 - DNA, 126 bp, Artificial Sequence
  source: /note="Description of Artificial Sequence: Synthetic polynucleotide"
aagcgcggtcggaagaagctgctgtacatctttaagcaacccttcatgaggcctgtgcagactactcaagaggaggacggctgttcatgccggttcccagaggaggaggaaggcggctgcgaactg

SEQ ID NO: 863 - DNA, 126 bp, Artificial Sequence
  source: /note="Description of Artificial Sequence: Synthetic polynucleotide"
aagcgcggaagaaagaagctgctctacatcttcaagcaacccttcatgcggcctgtgcagaccacccaggaagaggatggctgctcctgccggttcccggaggaagaagagggcggatgcgaactg

SEQ ID NO: 864 - DNA, 126 bp, Artificial Sequence
  source: /note="Description of Artificial Sequence: Synthetic polynucleotide"
aaacgcggaaggaagaagctgttgtacattttcaagcagcccttcatgcgcccggtgcaaactactcaggaggaagatggctgttcctgtcggttccccgaagaggaagaaggcggctgcgagttg

SEQ ID NO: 865 - DNA, 336 bp, Artificial Sequence
  source: /note="Description of Artificial Sequence: Synthetic polynucleotide"
cgcgtgaaattcagccgcagcgcagatgctccagcctaccagcaggggcagaaccagctctacaacgaactcaatcttggtcggagagaggagtacgacgtgctggacaagcggagaggacgggacccagaaatgggcgggaagccgcgcagaaagaatccccaagagggcctgtacaacgagctccaaaaggataagatggcagaagcctatagcgagattggtatgaaaggggaacgcagaagaggcaaaggccacgacggactgtaccagggactcagcaccgccaccaaggacacctatgacgctcttcacatgcaggccctgccgcctcgg

SEQ ID NO: 866 - DNA, 336 bp, Artificial Sequence
  source: /note="Description of Artificial Sequence: Synthetic polynucleotide"
cgcgtgaagttcagccgaagcgccgacgccccggcctaccagcagggccagaaccaactgtacaacgaactcaacctgggtcggagagaagagtacgacgtgctggacaaaagacgcggcagggaccccgagatgggcggaaagcctcgccgcaagaacccgcaggagggcctctacaacgagctgcagaaggacaagatggccgaagcctactcagagatcggcatgaagggggagcggaggcgcgggaagggccacgacggtttgtaccaaggactttccactgcgaccaaggacacctacgatgccctccatatgcaagccctgccgccccgg

SEQ ID NO: 867 - DNA, 336 bp, Artificial Sequence
  source: /note="Description of Artificial Sequence: Synthetic polynucleotide"
agggtcaagttctcccggtccgccgatgctcccgcctaccaacaggggcagaaccagctttataacgaactgaacctgggcaggagggaggaatatgatgtgttggataagcgccggggccgggacccagaaatggggggaaagcccagaagaaagaaccctcaagagggactttacaacgaattgcagaaagacaaaatggccgaggcctactccgagattgggatgaagggcgaaagacggagaggaaaggggcacgacgggctctaccagggactcagcaccgccaccaaagatacctacgacgccctgcatatgcaggcgctgccgccgcgc

SEQ ID NO: 868 - DNA, 21 bp, Artificial Sequence
  source: /note="Description of Artificial Sequence: Synthetic oligonucleotide"
ttggcagaagccgccgcgaaa

SEQ ID NO: 869 - protein, 7 aa, Artificial Sequence
  source: /note="Description of Artificial Sequence: Synthetic peptide"
LAEAAAK

SEQ ID NO: 870 - DNA, 45 bp, Artificial Sequence
  source: /note="Description of Artificial Sequence: Synthetic oligonucleotide"
ggtggaggtggcagcggaggaggtgggtccggcggtggaggaagc

SEQ ID NO: 871 - DNA, 45 bp, Artificial Sequence
  source: /note="Description of Artificial Sequence: Synthetic oligonucleotide"
ggcggaggcgggagcggaggaggaggctctggcggaggaggaagc

SEQ ID NO: 872 - DNA, 45 bp, Artificial Sequence
  source: /note="Description of Artificial Sequence: Synthetic oligonucleotide"
ggcggtggaggctcgggggggggcggctcaggaggaggcggctca

SEQ ID NO: 873 - DNA, 66 bp, Artificial Sequence
  source: /note="Description of Artificial Sequence: Synthetic oligonucleotide"
ggaagcggagctactaacttcagcctgctgaagcaggctggagacgtggaggagaaccctggacct

SEQ ID NO: 874 - protein, 22 aa, Artificial Sequence
  source: /note="Description of Artificial Sequence: Synthetic peptide"
GSGATNFSLLKQAGDVEENPGP

SEQ ID NO: 875 - DNA, 66 bp, Artificial Sequence
  source: /note="Description of Artificial Sequence: Synthetic oligonucleotide"
ggttccggagctaccaacttctcgctgttgaagcaggccggagatgtcgaggaaaacccgggacct

SEQ ID NO: 876 - DNA, 15 bp, Artificial Sequence
  source: /note="Description of Artificial Sequence: Synthetic oligonucleotide"
ggtggaggtggcagc

SEQ ID NO: 877 - protein, 5 aa, Artificial Sequence
  source: /note="Description of Artificial Sequence: Synthetic peptide"
GGGGS

SEQ ID NO: 878 - protein, 15 aa, Artificial Sequence
  source: /note="Description of Artificial Sequence: Synthetic peptide"
GSSSSGSSSSGSSSS

SEQ ID NO: 879 - protein, 217 aa, Artificial Sequence
  source: /note="Description of Artificial Sequence: Synthetic polypeptide"
APEAAGGPSVFLFPPKPKDTLMISRTPEVTCVVVDVSHEDPEVKFNWYVDGVEVHNAKTKPREEQYNSTYRVVSVLTVLHQDWLNGKEYKCKVSNKALAAPIEKTISKAKGQPREPQVYTLPPSRDELTKNQVSLTCLVKGFYPSDIAVEWESNGQPENNYKTTPPVLDSDGSFFLYSKLTVDKSRWQQGNVFSCSVMHEALHNHYTQKSLSLSPGK

SEQ ID NO: 880 - protein, 217 aa, Artificial Sequence
  source: /note="Description of Artificial Sequence: Synthetic polypeptide"
APEAAGAPSVFLFPPKPKDTLMISRTPEVTCVVVDVSHEDPEVKFNWYVDGVEVHNAKTKPREEQYNSTYRVVSVLTVLHQDWLNGKEYKCKVSNKALPAPIEKTISKAKGQPREPQVYTLPPSRDELTKNQVSLTCLVKGFYPSDIAVEWESNGQPENNYKTTPPVLDSDGSFFLYSKLTVDKSRWQQGNVFSCSVMHEALHNHYTQKSLSLSPGK

SEQ ID NO: 881 - protein, 217 aa, Artificial Sequence
  source: /note="Description of Artificial Sequence: Synthetic polypeptide"
APEAAGGPSVFLFPPKPKDTLMISRTPEVTCVVVDVSHEDPEVKFNWYVDGVEVHNAKTKPREEQYNSTYRVVSVLTVLHQDWLNGKEYKCKVSNKALGAPIEKTISKAKGQPREPQVYTLPPSRDELTKNQVSLTCLVKGFYPSDIAVEWESNGQPENNYKTTPPVLDSDGSFFLYSKLTVDKSRWQQGNVFSCSVMHEALHNHYTQKSLSLSPGK

SEQ ID NO: 882 - protein, 227 aa, Artificial Sequence
  source: /note="Description of Artificial Sequence: Synthetic polypeptide"
DKTHTCPPCPAPEAAGGPSVFLFPPKPKDTLMISRTPEVTCVVVDVSHEDPEVKFNWYVDGVEVHNAKTKPREEQYNSTYRVVSVLTVLHQDWLNGKEYKCKVSNKALGAPIEKTISKAKGQPREPQVYTLPPSRREEMKNQVSLTCLVKGFYPSDIAVEWESNGQPENNYKTTPPVLDSDGSFFLYSKLTVDKSRWQQGNVFSCSVMHEALHNHYTQKSLSLSPGK

SEQ ID NO: 883 - protein, 217 aa, Artificial Sequence
  source: /note="Description of Artificial Sequence: Synthetic polypeptide"
APELLGGPSVFLFPPKPKDTLMISRTPEVTCVVVAVSHEDPEVKFNWYVDGVEVHNAKTKPREEQYNSTYRVVSVLTVLHQDWLNGKEYKCKVSNKALAAPIEKTISKAKGQPREPQVYTLPPSRDELTKNQVSLTCLVKGFYPSDIAVEWESNGQPENNYKTTPPVLDSDGSFFLYSKLTVDKSRWQQGNVFSCSVMHEALHNHYTQKSLSLSPGK

SEQ ID NO: 884 - protein, 227 aa, Artificial Sequence
  source: /note="Description of Artificial Sequence: Synthetic polypeptide"
DKTHTCPPCPAPELLGGPSVFLFPPKPKDTLMISRTPEVTCVVVAVSHEDPEVKFNWYVDGVEVHNAKTKPREEQYNSTYRVVSVLTVLHQDWLNGKEYKCKVSNKALAAPIEKTISKAKGQPREPQVYTLPPSREEMTKNQVSLTCLVKGFYPSDIAVEWESNGQPENNYKTTPPVLDSDGSFFLYSKLTVDKSRWQQGNVFSCSVMHEALHNHYTQKSLSLSPGK

SEQ ID NO: 885 - protein, 217 aa, Artificial Sequence
  source: /note="Description of Artificial Sequence: Synthetic polypeptide"
APEAAGGPSVFLFPPKPKDTLMISRTPEVTCVVVDVKHEDPEVKFNWYVDGVEVHNAKTKPREEQYNSTYRVVSVLTVLHQDWLNGKEYKCKVSNKALAAPIEKTISKAKGQPREPQVYTLPPSRDELTKNQVSLTCLVKGFYPSDIAVEWESNGQPENNYKTTPPVLDSDGSFFLYSKLTVDKSRWQQGNVFSCSVMHEALHNHYTQKSLSLSPGK

SEQ ID NO: 886 - protein, 227 aa, Artificial Sequence
  source: /note="Description of Artificial Sequence: Synthetic polypeptide"
DKTHTCPPCPAPEAAGGPSVFLFPPKPKDTLMISRTPEVTCVVVDVKHEDPEVKFNWYVDGVEVHNAKTKPREEQYNSTYRVVSVLTVLHQDWLNGKEYKCKVSNKALAAPIEKTISKAKGQPREPQVYTLPPSREEMTKNQVSLTCLVKGFYPSDIAVEWESNGQPENNYKTTPPVLDSDGSFFLYSKLTVDKSRWQQGNVFSCSVMHEALHNHYTQKSLSLSPGK

SEQ ID NO: 887 - protein, 217 aa, Artificial Sequence
  source: /note="Description of Artificial Sequence: Synthetic polypeptide"
APELLGGPSVFLFPPKPKDTLMISRTPEVTCVVVAVKHEDPEVKFNWYVDGVEVHNAKTKPREEQYNSTYRVVSVLTVLHQDWLNGKEYKCKVSNKALAAPIEKTISKAKGQPREPQVYTLPPSRDELTKNQVSLTCLVKGFYPSDIAVEWESNGQPENNYKTTPPVLDSDGSFFLYSKLTVDKSRWQQGNVFSCSVMHEALHNHYTQKSLSLSPGK

SEQ ID NO: 888 - protein, 217 aa, Artificial Sequence
  source: /note="Description of Artificial Sequence: Synthetic polypeptide"
APELLGAPSVFLFPPKPKDTLMISRTPEVTCVVVAVSHEDPEVKFNWYVDGVEVHNAKTKPREEQYNSTYRVVSVLTVLHQDWLNGKEYKCKVSNKALAAPIEKTISKAKGQPREPQVYTLPPSRDELTKNQVSLTCLVKGFYPSDIAVEWESNGQPENNYKTTPPVLDSDGSFFLYSKLTVDKSRWQQGNVFSCSVMHEALHNHYTQKSLSLSPGK

SEQ ID NO: 889 - protein, 217 aa, Artificial Sequence
  source: /note="Description of Artificial Sequence: Synthetic polypeptide"
APELLGAPSVFLFPPKPKDTLMISRTPEVTCVVVAVKHEDPEVKFNWYVDGVEVHNAKTKPREEQYNSTYRVVSVLTVLHQDWLNGKEYKCKVSNKALAAPIEKTISKAKGQPREPQVYTLPPSRDELTKNQVSLTCLVKGFYPSDIAVEWESNGQPENNYKTTPPVLDSDGSFFLYSKLTVDKSRWQQGNVFSCSVMHEALHNHYTQKSLSLSPGK

SEQ ID NO: 890 - protein, 227 aa, Artificial Sequence
  source: /note="Description of Artificial Sequence: Synthetic polypeptide"
DKTHTCPPCPAPELLGAPSVFLFPPKPKDTLMISRTPEVTCVVVAVKHEDPEVKFNWYVDGVEVHNAKTKPREEQYNSTYRVVSVLTVLHQDWLNGKEYKCKVSNKALAAPIEKTISKAKGQPREPQVYTLPPSRREEMKNQVSLTCLVKGFYPSDIAVEWESNGQPENNYKTTPPVLDSDGSFFLYSKLTVDKSRWQQGNVFSCSVMHEALHNHYTQKSLSLSPGK

SEQ ID NO: 891 - protein, 217 aa, Artificial Sequence
  source: /note="Description of Artificial Sequence: Synthetic polypeptide"
APELLGGPSVFLFPPKPKDTLMISRTPEVTCVVVAVSHEDPEVKFNWYVDGVEVHNAKTKPREEQYASTYRVVSVLTVLHQDWLNGKEYKCKVSNKALAAPIEKTISKAKGQPREPQVYTLPPSRDELTKNQVSLTCLVKGFYPSDIAVEWESNGQPENNYKTTPPVLDSDGSFFLYSKLTVDKSRWQQGNVFSCSVMHEALHNHYTQKSLSLSPGK

SEQ ID NO: 892 - protein, 226 aa, Artificial Sequence; identical to SEQ ID NO: 705
  source: /note="Description of Artificial Sequence: Synthetic polypeptide"

SEQ ID NO: 893 - protein, 723 aa, Artificial Sequence
  source: /note="Description of Artificial Sequence: Synthetic polypeptide"
QVQLVESGGGLVQPGGSLRLSCAASGFTFSTYGMSWVRQAPGKGLEWVSSIFYTGSSTYYADSVKGRFTISRDNSKNTLYLQMNSLRAEDTAVYYCARIGYAGDSKYAIWGQGTLVTVSSASTKGPSVFPLAPSSKSTSGGTAALGCLVKDYFPEPVTVSWNSGALTSGVHTFPAVLQSSGLYSLSSVVTVPSSSLGTQTYICNVNHKPSNTKVDKRVEPKSCDKTHTCPPCPAPEAAGGPSVFLFPPKPKDTLMISRTPEVTCVVVDVKHEDPEVKFNWYVDGVEVHNAKTKPREEQYNSTYRVVSVLTVLHQDWLNGKEYKCKVSNKALAAPIEKTISKAKGQPREPQVYTLPPSREEMTKNQVSLTCLVKGFYPSDIAVEWESNGQPENNYKTTPPVLDSDGSFFLYSKLTVDKSRWQQGNVFSCSVMHEALHNHYTQKSLSLSPGGGGGSGGGGSGGGGSGGGGSEVQLVESGGGLVQPGGSLKLSCAASGFTFNKYAMNWVRQAPGKCLEWVARIRSKYNNYATYYADSVKDRFTISRDDSKNTAYLQMNNLKTEDTAVYYCVRHGNFGNSYISYWAYWGQGTLVTVSSGGGGSGGGGSGGGGSGGGGSQTVVTQEPSLTVSPGGTVTLTCGSSTGAVTSGNYPNWVQQKPGQAPRGLIGGTKFLAPGTPARFSGSLLGGKAALTLSGVQPEDEAEYYCVLWYSNRWVFGCGTKLTVL

SEQ ID NO: 894 - protein, 214 aa, Artificial Sequence; identical to SEQ ID NO: 518
  source: /note="Description of Artificial Sequence: Synthetic polypeptide"

SEQ ID NO: 895 - protein, 702 aa, Artificial Sequence
  source: /note="Description of Artificial Sequence: Synthetic polypeptide"
QVQLVQSGAEVKKPGASVKVSCKASGYTFTSYYIHWVRQAPGQGLEWIGCIYPGNVNTNYNEKFKDRATLTVDTSISTAYMELSRLRSDDTAVYFCTRSHYGLDWNFDVWGQGTTVTVSSASTKGPSVFPLAPSSKSTSGGTAALGCLVKDYFPEPVTVSWNSGALTSGVHTFPAVLQSSGLYSLSSVVTVPSSSLGTQTYICNVNHKPSNTKVDKRVEPKSCDKTHTCPPCPAPEAAGGPSVFLFPPKPKDTLMISRTPEVTCVVVDVKHEDPEVKFNWYVDGVEVHNAKTKPREEQYNSTYRVVSVLTVLHQDWLNGKEYKCKVSNKALAAPIEKTISKAKGQPREPQVYTLPPSREEMTKNQVSLTCLVKGFYPSDIAVEWESNGQPENNYKTTPPVLDSDGSFFLYSKLTVDKSRWQQGNVFSCSVMHEALHNHYTQKSLSLSPGGGSEVKLVESGGDLVQPGDSLTLSCVASGFTFSKQGMHWIRQAPKKGLEWIAMIYYDSSKMYYADTVKGRFTISRDNSKNTLYLEMNSLRSEDTAMYYCASFWWDLDFDHWGQGVMVTVSSGGGGSGGGGSGGGGSGGGGSDILVTQTPVSLPVSLGGHVSISCRSSQSLVRSEGTTYFNWYLQKPGQSPQLLIYRVSNRFSGVPDRFSGSGSGTDFTLKISRVEPEDLGVYYCLQSSHFPWTFGGGTKLELK

SEQ ID NO: 896 - protein, 5 aa, Artificial Sequence
  source: /note="Description of Artificial Sequence: Synthetic peptide"
NYNLH

SEQ ID NO: 897 - protein, 17 aa, Artificial Sequence
  source: /note="Description of Artificial Sequence: Synthetic peptide"
AIYPGNYDTSYNQKFKG

SEQ ID NO: 898 - protein, 13 aa, Artificial Sequence
  source: /note="Description of Artificial Sequence: Synthetic peptide"
VDFGHSRYWYFDV

SEQ ID NO: 899 - protein, 7 aa, Artificial Sequence
  source: /note="Description of Artificial Sequence: Synthetic peptide"
GYTFTNY

SEQ ID NO: 900 - protein, 6 aa, Artificial Sequence
  source: /note="Description of Artificial Sequence: Synthetic peptide"
YPGNYD

SEQ ID NO: 901 - protein, 13 aa, Artificial Sequence
  source: /note="Description of Artificial Sequence: Synthetic peptide"
VDFGHSRYWYFDV

SEQ ID NO: 902 - skipped

SEQ ID NO: 903 - protein, 8 aa, Artificial Sequence
  source: /note="Description of Artificial Sequence: Synthetic peptide"
GYTFTNYN

SEQ ID NO: 904 - protein, 8 aa, Artificial Sequence
  source: /note="Description of Artificial Sequence: Synthetic peptide"
IYPGNYDT

SEQ ID NO: 905 - protein, 15 aa, Artificial Sequence
  source: /note="Description of Artificial Sequence: Synthetic peptide"
ARVDFGHSRYWYFDV

SEQ ID NO: 906 - protein, 10 aa, Artificial Sequence
  source: /note="Description of Artificial Sequence: Synthetic peptide"
GYTFTNYNLH

SEQ ID NO: 907 - protein, 17 aa, Artificial Sequence
  source: /note="Description of Artificial Sequence: Synthetic peptide"
AIYPGNYDTSYNQKFKG

SEQ ID NO: 908 - protein, 13 aa, Artificial Sequence
  source: /note="Description of Artificial Sequence: Synthetic peptide"
VDFGHSRYWYFDV

SEQ ID NO: 909 - protein, 122 aa, Artificial Sequence; identical to SEQ ID NO: 778
  source: /note="Description of Artificial Sequence: Synthetic polypeptide"

SEQ ID NO: 910 - protein, 10 aa, Artificial Sequence
  source: /note="Description of Artificial Sequence: Synthetic peptide"
RATSSVSSMN

SEQ ID NO: 911 - protein, 7 aa, Artificial Sequence
  source: /note="Description of Artificial Sequence: Synthetic peptide"
ATSNLAS

SEQ ID NO: 912 - protein, 9 aa, Artificial Sequence
  source: /note="Description of Artificial Sequence: Synthetic peptide"
QQWTFNPPT

SEQ ID NO: 913 - protein, 6 aa, Artificial Sequence
  source: /note="Description of Artificial Sequence: Synthetic peptide"
TSSVSS

SEQ ID NO: 914 - protein, 3 aa, Artificial Sequence
  source: /note="Description of Artificial Sequence: Synthetic peptide"
ATS

SEQ ID NO: 915 - protein, 6 aa, Artificial Sequence
  source: /note="Description of Artificial Sequence: Synthetic peptide"
WTFNPP

SEQ ID NO: 916 - protein, 5 aa, Artificial Sequence
  source: /note="Description of Artificial Sequence: Synthetic peptide"
SSVSS

SEQ ID NO: 917 - protein, 3 aa, Artificial Sequence
  source: /note="Description of Artificial Sequence: Synthetic peptide"
ATS

SEQ ID NO: 918 - protein, 9 aa, Artificial Sequence
  source: /note="Description of Artificial Sequence: Synthetic peptide"
QQWTFNPPT

SEQ ID NO: 919 - protein, 10 aa, Artificial Sequence
  source: /note="Description of Artificial Sequence: Synthetic peptide"
RATSSVSSMN

SEQ ID NO: 920 - protein, 7 aa, Artificial Sequence
  source: /note="Description of Artificial Sequence: Synthetic peptide"
ATSNLAS

SEQ ID NO: 921 - protein, 9 aa, Artificial Sequence
  source: /note="Description of Artificial Sequence: Synthetic peptide"
QQWTFNPPT

SEQ ID NO: 922 - protein, 106 aa, Artificial Sequence
  source: /note="Description of Artificial Sequence: Synthetic polypeptide"
EIVLTQSPATLSLSPGERATLSCRATSSVSSMNWYQQKPGQAPRPLIHATSNLASGIPARFSGSGSGTDYTLTISSLEPEDAAVYYCQQWTFNPPTFGQGTKLEIK

SEQ ID NO: 923 - protein, 248 aa, Artificial Sequence
  source: /note="Description of Artificial Sequence: Synthetic polypeptide"
QVQLVQSGAEVKKPGASVKVSCKASGYTFTNYNLHWVRQAPGQGLEWMGAIYPGNYDTSYNQKFKGRVTMTADKSTSTAYMELSSLRSEDTAVYYCARVDFGHSRYWYFDVWGQGTTVTVSSGGGGSGGGGSGGGGSGGGGSEIVLTQSPATLSLSPGERATLSCRATSSVSSMNWYQQKPGQAPRPLIHATSNLASGIPARFSGSGSGTDYTLTISSLEPEDAAVYYCQQWTFNPPTFGQGTKLEIK

SEQ ID NO: 924 - protein, 492 aa, Artificial Sequence
  source: /note="Description of Artificial Sequence: Synthetic polypeptide"
MALPVTALLLPLALLLHAARPQVQLVQSGAEVKKPGASVKVSCKASGYTFTNYNLHWVRQAPGQGLEWMGAIYPGNYDTSYNQKFKGRVTMTADKSTSTAYMELSSLRSEDTAVYYCARVDFGHSRYWYFDVWGQGTTVTVSSGGGGSGGGGSGGGGSGGGGSEIVLTQSPATLSLSPGERATLSCRATSSVSSMNWYQQKPGQAPRPLIHATSNLASGIPARFSGSGSGTDYTLTISSLEPEDAAVYYCQQWTFNPPTFGQGTKLEIKTTTPAPRPPTPAPTIASQPLSLRPEACRPAAGGAVHTRGLDFACDIYIWAPLAGTCGVLLLSLVITLYCKRGRKKLLYIFKQPFMRPVQTTQEEDGCSCRFPEEEEGGCELRVKFSRSADAPAYQQGQNQLYNELNLGRREEYDVLDKRRGRDPEMGGKPRRKNPQEGLYNELQKDKMAEAYSEIGMKGERRRGKGHDGLYQGLSTATKDTYDALHMQALPPR

SEQ ID NO: 925 - protein, 5 aa, Artificial Sequence
  source: /note="Description of Artificial Sequence: Synthetic peptide"
NYNLH

SEQ ID NO: 926 - protein, 17 aa, Artificial Sequence
  source: /note="Description of Artificial Sequence: Synthetic peptide"
AIYPGNYDTSYNQKFKG

SEQ ID NO: 927 - protein, 13 aa, Artificial Sequence
  source: /note="Description of Artificial Sequence: Synthetic peptide"
VDFGHSRYWYFDV

SEQ ID NO: 928 - protein, 7 aa, Artificial Sequence
  source: /note="Description of Artificial Sequence: Synthetic peptide"
GYTFTNY

SEQ ID NO: 929 - protein, 6 aa, Artificial Sequence
  source: /note="Description of Artificial Sequence: Synthetic peptide"
YPGNYD

SEQ ID NO: 930 - protein, 13 aa, Artificial Sequence
  source: /note="Description of Artificial Sequence: Synthetic peptide"
VDFGHSRYWYFDV

SEQ ID NO: 931 - protein, 8 aa, Artificial Sequence
  source: /note="Description of Artificial Sequence: Synthetic peptide"
GYTFTNYN

SEQ ID NO: 932 - protein, 8 aa, Artificial Sequence
  source: /note="Description of Artificial Sequence: Synthetic peptide"
IYPGNYDT

SEQ ID NO: 933 - protein, 15 aa, Artificial Sequence
  source: /note="Description of Artificial Sequence: Synthetic peptide"
ARVDFGHSRYWYFDV

SEQ ID NO: 934 - protein, 122 aa, Artificial Sequence
  source: /note="Description of Artificial Sequence: Synthetic polypeptide"
QVQLVQSGAEVKKPGSSVKVSCKASGYTFTNYNLHWVRQAPGQGLEWMGAIYPGNYDTSYNQKFKGRVTITADKSTSTAYMELSSLRSEDTAVYYCARVDFGHSRYWYFDVWGQGTTVTVSS

SEQ ID NO: 935 - protein, 10 aa, Artificial Sequence
  source: /note="Description of Artificial Sequence: Synthetic peptide"
RATSSVSSMN

SEQ ID NO: 936 - protein, 7 aa, Artificial Sequence
  source: /note="Description of Artificial Sequence: Synthetic peptide"
ATSNLAS

SEQ ID NO: 937 - protein, 9 aa, Artificial Sequence
  source: /note="Description of Artificial Sequence: Synthetic peptide"
QQWTFNPPT

SEQ ID NO: 938 - protein, 6 aa, Artificial Sequence
  source: /note="Description of Artificial Sequence: Synthetic peptide"
TSSVSS

SEQ ID NO: 939 - protein, 3 aa, Artificial Sequence
  source: /note="Description of Artificial Sequence: Synthetic peptide"
ATS

SEQ ID NO: 940 - protein, 6 aa, Artificial Sequence
  source: /note="Description of Artificial Sequence: Synthetic peptide"
WTFNPP

SEQ ID NO: 941 - protein, 5 aa, Artificial Sequence
  source: /note="Description of Artificial Sequence: Synthetic peptide"
SSVSS

SEQ ID NO: 942 - protein, 3 aa, Artificial Sequence
  source: /note="Description of Artificial Sequence: Synthetic peptide"
ATS

SEQ ID NO: 943 - protein, 9 aa, Artificial Sequence
  source: /note="Description of Artificial Sequence: Synthetic peptide"
QQWTFNPPT

SEQ ID NO: 944 - protein, 10 aa, Artificial Sequence
  source: /note="Description of Artificial Sequence: Synthetic peptide"
RATSSVSSMN

SEQ ID NO: 945 - protein, 7 aa, Artificial Sequence
  source: /note="Description of Artificial Sequence: Synthetic peptide"
ATSNLAS

SEQ ID NO: 946 - protein, 9 aa, Artificial Sequence
  source: /note="Description of Artificial Sequence: Synthetic peptide"
QQWTFNPPT

SEQ ID NO: 947 - protein, 106 aa, Artificial Sequence; identical to SEQ ID NO: 922
  source: /note="Description of Artificial Sequence: Synthetic polypeptide"

SEQ ID NO: 948 - protein, 248 aa, Artificial Sequence
  source: /note="Description of Artificial Sequence: Synthetic polypeptide"
QVQLVQSGAEVKKPGSSVKVSCKASGYTFTNYNLHWVRQAPGQGLEWMGAIYPGNYDTSYNQKFKGRVTITADKSTSTAYMELSSLRSEDTAVYYCARVDFGHSRYWYFDVWGQGTTVTVSSGGGGSGGGGSGGGGSGGGGSEIVLTQSPATLSLSPGERATLSCRATSSVSSMNWYQQKPGQAPRPLIHATSNLASGIPARFSGSGSGTDYTLTISSLEPEDAAVYYCQQWTFNPPTFGQGTKLEIK

SEQ ID NO: 949 - protein, 492 aa, Artificial Sequence
  source: /note="Description of Artificial Sequence: Synthetic polypeptide"
MALPVTALLLPLALLLHAARPQVQLVQSGAEVKKPGSSVKVSCKASGYTFTNYNLHWVRQAPGQGLEWMGAIYPGNYDTSYNQKFKGRVTITADKSTSTAYMELSSLRSEDTAVYYCARVDFGHSRYWYFDVWGQGTTVTVSSGGGGSGGGGSGGGGSGGGGSEIVLTQSPATLSLSPGERATLSCRATSSVSSMNWYQQKPGQAPRPLIHATSNLASGIPARFSGSGSGTDYTLTISSLEPEDAAVYYCQQWTFNPPTFGQGTKLEIKTTTPAPRPPTPAPTIASQPLSLRPEACRPAAGGAVHTRGLDFACDIYIWAPLAGTCGVLLLSLVITLYCKRGRKKLLYIFKQPFMRPVQTTQEEDGCSCRFPEEEEGGCELRVKFSRSADAPAYQQGQNQLYNELNLGRREEYDVLDKRRGRDPEMGGKPRRKNPQEGLYNELQKDKMAEAYSEIGMKGERRRGKGHDGLYQGLSTATKDTYDALHMQALPPR

SEQ ID NO: 950 - protein, 5 aa, Artificial Sequence
  source: /note="Description of Artificial Sequence: Synthetic peptide"
NYNLH

SEQ ID NO: 951 - protein, 17 aa, Artificial Sequence
  source: /note="Description of Artificial Sequence: Synthetic peptide"
AIYPGNYDTSYNQKFKG

SEQ ID NO: 952 - protein, 13 aa, Artificial Sequence
  source: /note="Description of Artificial Sequence: Synthetic peptide"
VDFGHSRYWYFDV

SEQ ID NO: 953 - protein, 7 aa, Artificial Sequence
  source: /note="Description of Artificial Sequence: Synthetic peptide"
GYTFTNY

SEQ ID NO: 954 - protein, 6 aa, Artificial Sequence
  source: /note="Description of Artificial Sequence: Synthetic peptide"
YPGNYD

SEQ ID NO: 955 - protein, 13 aa, Artificial Sequence
  source: /note="Description of Artificial Sequence: Synthetic peptide"
VDFGHSRYWYFDV

SEQ ID NO: 956 - protein, 8 aa, Artificial Sequence
  source: /note="Description of Artificial Sequence: Synthetic peptide"
GYTFTNYN

SEQ ID NO: 957 - protein, 8 aa, Artificial Sequence
  source: /note="Description of Artificial Sequence: Synthetic peptide"
IYPGNYDT

SEQ ID NO: 958 - protein, 15 aa, Artificial Sequence
  source: /note="Description of Artificial Sequence: Synthetic peptide"
ARVDFGHSRYWYFDV

SEQ ID NO: 959 - protein, 10 aa, Artificial Sequence
  source: /note="Description of Artificial Sequence: Synthetic peptide"
GYTFTNYNLH

SEQ ID NO: 960 - protein, 17 aa, Artificial Sequence
  source: /note="Description of Artificial Sequence: Synthetic peptide"
AIYPGNYDTSYNQKFKG

SEQ ID NO: 961 - protein, 13 aa, Artificial Sequence
  source: /note="Description of Artificial Sequence: Synthetic peptide"
VDFGHSRYWYFDV

SEQ ID NO: 962 - protein, 122 aa, Artificial Sequence; identical to SEQ ID NO: 934
  source: /note="Description of Artificial Sequence: Synthetic polypeptide"

SEQ ID NO: 963 - protein, 10 aa, Artificial Sequence
  source: /note="Description of Artificial Sequence: Synthetic peptide"
RATSSVSSMN

SEQ ID NO: 964 - protein, 7 aa, Artificial Sequence
  source: /note="Description of Artificial Sequence: Synthetic peptide"
ATSNLAS

SEQ ID NO: 965 - protein, 9 aa, Artificial Sequence
  source: /note="Description of Artificial Sequence: Synthetic peptide"
QQWTFNPPT

SEQ ID NO: 966 - protein, 6 aa, Artificial Sequence
  source: /note="Description of Artificial Sequence: Synthetic peptide"
TSSVSS

SEQ ID NO: 967 - protein, 3 aa, Artificial Sequence
  source: /note="Description of Artificial Sequence: Synthetic peptide"
ATS

SEQ ID NO: 968 - protein, 6 aa, Artificial Sequence
  source: /note="Description of Artificial Sequence: Synthetic peptide"
WTFNPP

SEQ ID NO: 969 - protein, 5 aa, Artificial Sequence
  source: /note="Description of Artificial Sequence: Synthetic peptide"
SSVSS

SEQ ID NO: 970 - protein, 3 aa, Artificial Sequence
  source: /note="Description of Artificial Sequence: Synthetic peptide"
ATS

SEQ ID NO: 971 - protein, 9 aa, Artificial Sequence
  source: /note="Description of Artificial Sequence: Synthetic peptide"
QQWTFNPPT

SEQ ID NO: 972 - protein, 10 aa, Artificial Sequence
  source: /note="Description of Artificial Sequence: Synthetic peptide"
RATSSVSSMN

SEQ ID NO: 973 - protein, 7 aa, Artificial Sequence
  source: /note="Description of Artificial Sequence: Synthetic peptide"
ATSNLAS

SEQ ID NO: 974 - protein, 9 aa, Artificial Sequence
  source: /note="Description of Artificial Sequence: Synthetic peptide"
QQWTFNPPT

SEQ ID NO: 975 - protein, 106 aa, Artificial Sequence; identical to SEQ ID NO: 787
  source: /note="Description of Artificial Sequence: Synthetic polypeptide"

SEQ ID NO: 976 - protein, 248 aa, Artificial Sequence
  source: /note="Description of Artificial Sequence: Synthetic polypeptide"
QVQLVQSGAEVKKPGSSVKVSCKASGYTFTNYNLHWVRQAPGQGLEWMGAIYPGNYDTSYNQKFKGRVTITADKSTSTAYMELSSLRSEDTAVYYCARVDFGHSRYWYFDVWGQGTTVTVSSGGGGSGGGGSGGGGSGGGGSDIQLTQSPSFLSASVGDRVTITCRATSSVSSMNWYQQKPGKAPKPLIHATSNLASGVPSRFSGSGSGTEYTLTISSLQPEDFATYYCQQWTFNPPTFGQGTKLEIK

SEQ ID NO: 977 - protein, 492 aa, Artificial Sequence
  source: /note="Description of Artificial Sequence: Synthetic polypeptide"
MALPVTALLLPLALLLHAARPQVQLVQSGAEVKKPGSSVKVSCKASGYTFTNYNLHWVRQAPGQGLEWMGAIYPGNYDTSYNQKFKGRVTITADKSTSTAYMELSSLRSEDTAVYYCARVDFGHSRYWYFDVWGQGTTVTVSSGGGGSGGGGSGGGGSGGGGSDIQLTQSPSFLSASVGDRVTITCRATSSVSSMNWYQQKPGKAPKPLIHATSNLASGVPSRFSGSGSGTEYTLTISSLQPEDFATYYCQQWTFNPPTFGQGTKLEIKTTTPAPRPPTPAPTIASQPLSLRPEACRPAAGGAVHTRGLDFACDIYIWAPLAGTCGVLLLSLVITLYCKRGRKKLLYIFKQPFMRPVQTTQEEDGCSCRFPEEEEGGCELRVKFSRSADAPAYQQGQNQLYNELNLGRREEYDVLDKRRGRDPEMGGKPRRKNPQEGLYNELQKDKMAEAYSEIGMKGERRRGKGHDGLYQGLSTATKDTYDALHMQALPPR

SEQ ID NO: 978 - protein, 5 aa, Artificial Sequence
  source: /note="Description of Artificial Sequence: Synthetic peptide"
NYWMH

SEQ ID NO: 979 - protein, 17 aa, Artificial Sequence
  source: /note="Description of Artificial Sequence: Synthetic peptide"
FITPTTGYPEYNQKFKD

SEQ ID NO: 980 - protein, 13 aa, Artificial Sequence
  source: /note="Description of Artificial Sequence: Synthetic peptide"
RKVGKGVYYALDY

SEQ ID NO: 981 - protein, 7 aa, Artificial Sequence
  source: /note="Description of Artificial Sequence: Synthetic peptide"
GYTFTNY

SEQ ID NO: 982 - protein, 6 aa, Artificial Sequence
  source: /note="Description of Artificial Sequence: Synthetic peptide"
TPTTGY

SEQ ID NO: 983 - protein, 13 aa, Artificial Sequence
  source: /note="Description of Artificial Sequence: Synthetic peptide"
RKVGKGVYYALDY

SEQ ID NO: 984 - protein, 8 aa, Artificial Sequence
  source: /note="Description of Artificial Sequence: Synthetic peptide"
GYTFTNYW

SEQ ID NO: 985 - protein, 8 aa, Artificial Sequence
  source: /note="Description of Artificial Sequence: Synthetic peptide"
ITPTTGYP

SEQ ID NO: 986 - protein, 15 aa, Artificial Sequence
  source: /note="Description of Artificial Sequence: Synthetic peptide"
ARRKVGKGVYYALDY

SEQ ID NO: 987 - protein, 10 aa, Artificial Sequence
  source: /note="Description of Artificial Sequence: Synthetic peptide"
GYTFTNYWMH

SEQ ID NO: 988 - protein, 17 aa, Artificial Sequence
  source: /note="Description of Artificial Sequence: Synthetic peptide"
FITPTTGYPEYNQKFKD

SEQ ID NO: 989 - protein, 13 aa, Artificial Sequence
  source: /note="Description of Artificial Sequence: Synthetic peptide"
RKVGKGVYYALDY

SEQ ID NO: 990 - protein, 122 aa, Artificial Sequence
  source: /note="Description of Artificial Sequence: Synthetic polypeptide"
QVQLVQSGAEVKKPGASVKVSCKASGYTFTNYWMHWVRQAPGQGLEWMGFITPTTGYPEYNQKFKDRVTMTADKSTSTAYMELSSLRSEDTAVYYCARRKVGKGVYYALDYWGQGTTVTVSS

SEQ ID NO: 991 - protein, 11 aa, Artificial Sequence
  source: /note="Description of Artificial Sequence: Synthetic peptide"
RASGNIHNYLA

SEQ ID NO: 992 - protein, 7 aa, Artificial Sequence
  source: /note="Description of Artificial Sequence: Synthetic peptide"
NTKTLAD

SEQ ID NO: 993 - protein, 9 aa, Artificial Sequence
  source: /note="Description of Artificial Sequence: Synthetic peptide"
QHFWSSPWT

SEQ ID NO: 994 - protein, 7 aa, Artificial Sequence
  source: /note="Description of Artificial Sequence: Synthetic peptide"
SGNIHNY

SEQ ID NO: 995 - protein, 3 aa, Artificial Sequence
  source: /note="Description of Artificial Sequence: Synthetic peptide"
NTK

SEQ ID NO: 996 - protein, 6 aa, Artificial Sequence
  source: /note="Description of Artificial Sequence: Synthetic peptide"
FWSSPW

SEQ ID NO: 997 - protein, 6 aa, Artificial Sequence
  source: /note="Description of Artificial Sequence: Synthetic peptide"
GNIHNY

SEQ ID NO: 998 - protein, 3 aa, Artificial Sequence
  source: /note="Description of Artificial Sequence: Synthetic peptide"
NTK

SEQ ID NO: 999 - protein, 9 aa, Artificial Sequence
  source: /note="Description of Artificial Sequence: Synthetic peptide"
QHFWSSPWT

SEQ ID NO: 1000 - protein, 11 aa, Artificial Sequence
  source: /note="Description of Artificial Sequence: Synthetic peptide"
RASGNIHNYLA

SEQ ID NO: 1001 - protein, 7 aa, Artificial Sequence
  source: /note="Description of Artificial Sequence: Synthetic peptide"
NTKTLAD

SEQ ID NO: 1002 - protein, 9 aa, Artificial Sequence
  source: /note="Description of Artificial Sequence: Synthetic peptide"
QHFWSSPWT

SEQ ID NO: 1003 - protein, 107 aa, Artificial Sequence
  source: /note="Description of Artificial Sequence: Synthetic polypeptide"
DIQMTQSPSSLSASVGDRVTITCRASGNIHNYLAWYQQKPGKVPKLLIYNTKTLADGVPSRFSGSGSGTDYTLTISSLQPEDVATYYCQHFWSSPWTFGGGTKVEIK

SEQ ID NO: 1004 - protein, 249 aa, Artificial Sequence
  source: /note="Description of Artificial Sequence: Synthetic polypeptide"
QVQLVQSGAEVKKPGASVKVSCKASGYTFTNYWMHWVRQAPGQGLEWMGFITPTTGYPEYNQKFKDRVTMTADKSTSTAYMELSSLRSEDTAVYYCARRKVGKGVYYALDYWGQGTTVTVSSGGGGSGGGGSGGGGSGGGGSDIQMTQSPSSLSASVGDRVTITCRASGNIHNYLAWYQQKPGKVPKLLIYNTKTLADGVPSRFSGSGSGTDYTLTISSLQPEDVATYYCQHFWSSPWTFGGGTKVEIK

SEQ ID NO: 1005 - protein, 493 aa, Artificial Sequence
  source: /note="Description of Artificial Sequence: Synthetic polypeptide"
MALPVTALLLPLALLLHAARPQVQLVQSGAEVKKPGASVKVSCKASGYTFTNYWMHWVRQAPGQGLEWMGFITPTTGYPEYNQKFKDRVTMTADKSTSTAYMELSSLRSEDTAVYYCARRKVGKGVYYALDYWGQGTTVTVSSGGGGSGGGGSGGGGSGGGGSDIQMTQSPSSLSASVGDRVTITCRASGNIHNYLAWYQQKPGKVPKLLIYNTKTLADGVPSRFSGSGSGTDYTLTISSLQPEDVATYYCQHFWSSPWTFGGGTKVEIKTTTPAPRPPTPAPTIASQPLSLRPEACRPAAGGAVHTRGLDFACDIYIWAPLAGTCGVLLLSLVITLYCKRGRKKLLYIFKQPFMRPVQTTQEEDGCSCRFPEEEEGGCELRVKFSRSADAPAYQQGQNQLYNELNLGRREEYDVLDKRRGRDPEMGGKPRRKNPQEGLYNELQKDKMAEAYSEIGMKGERRRGKGHDGLYQGLSTATKDTYDALHMQALPPR

SEQ ID NO: 1006 - protein, 5 aa, Artificial Sequence
  source: /note="Description of Artificial Sequence: Synthetic peptide"
NYWMH

SEQ ID NO: 1007 - protein, 17 aa, Artificial Sequence
  source: /note="Description of Artificial Sequence: Synthetic peptide"
FITPTTGYPEYNQKFKD

SEQ ID NO: 1008 - protein, 13 aa, Artificial Sequence
  source: /note="Description of Artificial Sequence: Synthetic peptide"
RKVGKGVYYALDY

SEQ ID NO: 1009 - protein, 7 aa, Artificial Sequence
  source: /note="Description of Artificial Sequence: Synthetic peptide"
GYTFTNY

SEQ ID NO: 1010 - protein, 6 aa, Artificial Sequence
  source: /note="Description of Artificial Sequence: Synthetic peptide"
TPTTGY

SEQ ID NO: 1011 - protein, 13 aa, Artificial Sequence
  source: /note="Description of Artificial Sequence: Synthetic peptide"
RKVGKGVYYALDY

SEQ ID NO: 1012 - protein, 8 aa, Artificial Sequence
  source: /note="Description of Artificial Sequence: Synthetic peptide"
GYTFTNYW

SEQ ID NO: 1013 - protein, 8 aa, Artificial Sequence
  source: /note="Description of Artificial Sequence: Synthetic peptide"
ITPTTGYP

SEQ ID NO: 1014 - protein, 15 aa, Artificial Sequence
  source: /note="Description of Artificial Sequence: Synthetic peptide"
ARRKVGKGVYYALDY

SEQ ID NO: 1015 - protein, 10 aa, Artificial Sequence
  source: /note="Description of Artificial Sequence: Synthetic peptide"
GYTFTNYWMH

SEQ ID NO: 1016 - protein, 17 aa, Artificial Sequence
  source: /note="Description of Artificial Sequence: Synthetic peptide"
FITPTTGYPEYNQKFKD

SEQ ID NO: 1017 - protein, 13 aa, Artificial Sequence
  source: /note="Description of Artificial Sequence: Synthetic peptide"
RKVGKGVYYALDY

SEQ ID NO: 1018 - protein, 122 aa, Artificial Sequence
  source: /note="Description of Artificial Sequence: Synthetic polypeptide"
QVQLVQSGAEVKKPGSSVKVSCKASGYTFTNYWMHWVRQAPGQGLEWMGFITPTTGYPEYNQKFKDRVTITADKSTSTAYMELSSLRSEDTAVYYCARRKVGKGVYYALDYWGQGTTVTVSS

SEQ ID NO: 1019 - protein, 11 aa, Artificial Sequence
  source: /note="Description of Artificial Sequence: Synthetic peptide"
RASGNIHNYLA

SEQ ID NO: 1020 - protein, 7 aa, Artificial Sequence
  source: /note="Description of Artificial Sequence: Synthetic peptide"
NTKTLAD

SEQ ID NO: 1021 - protein, 9 aa, Artificial Sequence
  source: /note="Description of Artificial Sequence: Synthetic peptide"
QHFWSSPWT

SEQ ID NO: 1022 - protein, 7 aa, Artificial Sequence
  source: /note="Description of Artificial Sequence: Synthetic peptide"
SGNIHNY

SEQ ID NO: 1023 - protein, 3 aa, Artificial Sequence
  source: /note="Description of Artificial Sequence: Synthetic peptide"
NTK

SEQ ID NO: 1024 - protein, 6 aa, Artificial Sequence
  source: /note="Description of Artificial Sequence: Synthetic peptide"
FWSSPW

SEQ ID NO: 1025 - protein, 6 aa, Artificial Sequence
  source: /note="Description of Artificial Sequence: Synthetic peptide"
GNIHNY

SEQ ID NO: 1026 - protein, 3 aa, Artificial Sequence
  source: /note="Description of Artificial Sequence: Synthetic peptide"
NTK

SEQ ID NO: 1027 - protein, 9 aa, Artificial Sequence
  source: /note="Description of Artificial Sequence: Synthetic peptide"
QHFWSSPWT

SEQ ID NO: 1028 - protein, 11 aa, Artificial Sequence
  source: /note="Description of Artificial Sequence: Synthetic peptide"
RASGNIHNYLA

SEQ ID NO: 1029 - protein, 7 aa, Artificial Sequence
  source: /note="Description of Artificial Sequence: Synthetic peptide"
NTKTLAD

SEQ ID NO: 1030 - protein, 9 aa, Artificial Sequence
  source: /note="Description of Artificial Sequence: Synthetic peptide"
QHFWSSPWT

SEQ ID NO: 1031 - protein, 107 aa, Artificial Sequence; identical to SEQ ID NO: 1003
  source: /note="Description of Artificial Sequence: Synthetic polypeptide"

SEQ ID NO: 1032 - protein, 249 aa, Artificial Sequence
  source: /note="Description of Artificial Sequence: Synthetic polypeptide"
QVQLVQSGAEVKKPGSSVKVSCKASGYTFTNYWMHWVRQAPGQGLEWMGFITPTTGYPEYNQKFKDRVTITADKSTSTAYMELSSLRSEDTAVYYCARRKVGKGVYYALDYWGQGTTVTVSSGGGGSGGGGSGGGGSGGGGSDIQMTQSPSSLSASVGDRVTITCRASGNIHNYLAWYQQKPGKVPKLLIYNTKTLADGVPSRFSGSGSGTDYTLTISSLQPEDVATYYCQHFWSSPWTFGGGTKVEIK

SEQ ID NO: 1033 - protein, 493 aa, Artificial Sequence
  source: /note="Description of Artificial Sequence: Synthetic polypeptide"
MALPVTALLLPLALLLHAARPQVQLVQSGAEVKKPGSSVKVSCKASGYTFTNYWMHWVRQAPGQGLEWMGFITPTTGYPEYNQKFKDRVTITADKSTSTAYMELSSLRSEDTAVYYCARRKVGKGVYYALDYWGQGTTVTVSSGGGGSGGGGSGGGGSGGGGSDIQMTQSPSSLSASVGDRVTITCRASGNIHNYLAWYQQKPGKVPKLLIYNTKTLADGVPSRFSGSGSGTDYTLTISSLQPEDVATYYCQHFWSSPWTFGGGTKVEIKTTTPAPRPPTPAPTIASQPLSLRPEACRPAAGGAVHTRGLDFACDIYIWAPLAGTCGVLLLSLVITLYCKRGRKKLLYIFKQPFMRPVQTTQEEDGCSCRFPEEEEGGCELRVKFSRSADAPAYQQGQNQLYNELNLGRREEYDVLDKRRGRDPEMGGKPRRKNPQEGLYNELQKDKMAEAYSEIGMKGERRRGKGHDGLYQGLSTATKDTYDALHMQALPPR

SEQ ID NO: 1034 - protein, 5 aa, Artificial Sequence
  source: /note="Description of Artificial Sequence: Synthetic peptide"
NYWMH

SEQ ID NO: 1035 - protein, 17 aa, Artificial Sequence
  source: /note="Description of Artificial Sequence: Synthetic peptide"
FITPTTGYPEYNQKFKD

SEQ ID NO: 1036 - protein, 13 aa, Artificial Sequence
  source: /note="Description of Artificial Sequence: Synthetic peptide"
RKVGKGVYYALDY

SEQ ID NO: 1037 - protein, 7 aa, Artificial Sequence
  source: /note="Description of Artificial Sequence: Synthetic peptide"
GYTFTNY

SEQ ID NO: 1038 - protein, 6 aa, Artificial Sequence
  source: /note="Description of Artificial Sequence: Synthetic peptide"
TPTTGY

SEQ ID NO: 1039 - protein, 13 aa, Artificial Sequence
  source: /note="Description of Artificial Sequence: Synthetic peptide"
RKVGKGVYYALDY

SEQ ID NO: 1040 - protein, 8 aa, Artificial Sequence
  source: /note="Description of Artificial Sequence: Synthetic peptide"
GYTFTNYW

SEQ ID NO: 1041 - protein, 8 aa, Artificial Sequence
  source: /note="Description of Artificial Sequence: Synthetic peptide"
ITPTTGYP

SEQ ID NO: 1042 - protein, 15 aa, Artificial Sequence
  source: /note="Description of Artificial Sequence: Synthetic peptide"
ARRKVGKGVYYALDY

SEQ ID NO: 1043 - protein, 10 aa, Artificial Sequence
  source: /note="Description of Artificial Sequence: Synthetic peptide"
GYTFTNYWMH

SEQ ID NO: 1044 - protein, 17 aa, Artificial Sequence
  source: /note="Description of Artificial Sequence: Synthetic peptide"
FITPTTGYPEYNQKFKD

SEQ ID NO: 1045 - protein, 13 aa, Artificial Sequence
  source: /note="Description of Artificial Sequence: Synthetic peptide"
RKVGKGVYYALDY

SEQ ID NO: 1046 - protein, 122 aa, Artificial Sequence; identical to SEQ ID NO: 990
  source: /note="Description of Artificial Sequence: Synthetic polypeptide"

SEQ ID NO: 1047 - protein, 11 aa, Artificial Sequence
  source: /note="Description of Artificial Sequence: Synthetic peptide"
RASGNIHNYLA

SEQ ID NO: 1048 - protein, 7 aa, Artificial Sequence
  source: /note="Description of Artificial Sequence: Synthetic peptide"
NTKTLAD

SEQ ID NO: 1049 - protein, 9 aa, Artificial Sequence
  source: /note="Description of Artificial Sequence: Synthetic peptide"
QHFWSSPWT

SEQ ID NO: 1050 - protein, 7 aa, Artificial Sequence
  source: /note="Description of Artificial Sequence: Synthetic peptide"
SGNIHNY

SEQ ID NO: 1051 - protein, 3 aa, Artificial Sequence
  source: /note="Description of Artificial Sequence: Synthetic peptide"
NTK

SEQ ID NO: 1052 - protein, 6 aa, Artificial Sequence
  source: /note="Description of Artificial Sequence: Synthetic peptide"
FWSSPW

SEQ ID NO: 1053 - protein, 6 aa, Artificial Sequence
  source: /note="Description of Artificial Sequence: Synthetic peptide"
GNIHNY

SEQ ID NO: 1054 - protein, 3 aa, Artificial Sequence
  source: /note="Description of Artificial Sequence: Synthetic peptide"
NTK

SEQ ID NO: 1055 - protein, 9 aa, Artificial Sequence
  source: /note="Description of Artificial Sequence: Synthetic peptide"
QHFWSSPWT

SEQ ID NO: 1056 - protein, 11 aa, Artificial Sequence
  source: /note="Description of Artificial Sequence: Synthetic peptide"
RASGNIHNYLA

SEQ ID NO: 1057 - protein, 7 aa, Artificial Sequence
  source: /note="Description of Artificial Sequence: Synthetic peptide"
NTKTLAD

SEQ ID NO: 1058 - protein, 9 aa, Artificial Sequence
  source: /note="Description of Artificial Sequence: Synthetic peptide"
QHFWSSPWT

SEQ ID NO: 1059 - protein, 107 aa, Artificial Sequence
  source: /note="Description of Artificial Sequence: Synthetic polypeptide"
AIRMTQSPFSLSASVGDRVTITCRASGNIHNYLAWYQQKPAKAPKLFIYNTKTLADGVPSRFSGSGSGTDYTLTISSLQPEDFATYYCQHFWSSPWTFGGGTKVEIK

SEQ ID NO: 1060 - protein, 249 aa, Artificial Sequence
  source: /note="Description of Artificial Sequence: Synthetic polypeptide"
QVQLVQSGAEVKKPGASVKVSCKASGYTFTNYWMHWVRQAPGQGLEWMGFITPTTGYPEYNQKFKDRVTMTADKSTSTAYMELSSLRSEDTAVYYCARRKVGKGVYYALDYWGQGTTVTVSSGGGGSGGGGSGGGGSGGGGSAIRMTQSPFSLSASVGDRVTITCRASGNIHNYLAWYQQKPAKAPKLFIYNTKTLADGVPSRFSGSGSGTDYTLTISSLQPEDFATYYCQHFWSSPWTFGGGTKVEIK

SEQ ID NO: 1061 - protein, 493 aa, Artificial Sequence
  source: /note="Description of Artificial Sequence: Synthetic polypeptide"
MALPVTALLLPLALLLHAARPQVQLVQSGAEVKKPGASVKVSCKASGYTFTNYWMHWVRQAPGQGLEWMGFITPTTGYPEYNQKFKDRVTMTADKSTSTAYMELSSLRSEDTAVYYCARRKVGKGVYYALDYWGQGTTVTVSSGGGGSGGGGSGGGGSGGGGSAIRMTQSPFSLSASVGDRVTITCRASGNIHNYLAWYQQKPAKAPKLFIYNTKTLADGVPSRFSGSGSGTDYTLTISSLQPEDFATYYCQHFWSSPWTFGGGTKVEIKTTTPAPRPPTPAPTIASQPLSLRPEACRPAAGGAVHTRGLDFACDIYIWAPLAGTCGVLLLSLVITLYCKRGRKKLLYIFKQPFMRPVQTTQEEDGCSCRFPEEEEGGCELRVKFSRSADAPAYQQGQNQLYNELNLGRREEYDVLDKRRGRDPEMGGKPRRKNPQEGLYNELQKDKMAEAYSEIGMKGERRRGKGHDGLYQGLSTATKDTYDALHMQALPPR

SEQ ID NO: 1062 - protein, 5 aa, Artificial Sequence
  source: /note="Description of Artificial Sequence: Synthetic peptide"
NYWMH

SEQ ID NO: 1063 - protein, 17 aa, Artificial Sequence
  source: /note="Description of Artificial Sequence: Synthetic peptide"
FITPTTGYPEYNQKFKD

SEQ ID NO: 1064 - protein, 13 aa, Artificial Sequence
  source: /note="Description of Artificial Sequence: Synthetic peptide"
RKVGKGVYYALDY

SEQ ID NO: 1065 - protein, 7 aa, Artificial Sequence
  source: /note="Description of Artificial Sequence: Synthetic peptide"
GYTFTNY

SEQ ID NO: 1066 - protein, 6 aa, Artificial Sequence
  source: /note="Description of Artificial Sequence: Synthetic peptide"
TPTTGY

SEQ ID NO: 1067 - protein, 13 aa, Artificial Sequence
  source: /note="Description of Artificial Sequence: Synthetic peptide"
RKVGKGVYYALDY

SEQ ID NO: 1068 - protein, 8 aa, Artificial Sequence
  source: /note="Description of Artificial Sequence: Synthetic peptide"
GYTFTNYW

SEQ ID NO: 1069 - protein, 8 aa, Artificial Sequence
  source: /note="Description of Artificial Sequence: Synthetic peptide"
ITPTTGYP

SEQ ID NO: 1070 - protein, 15 aa, Artificial Sequence
  source: /note="Description of Artificial Sequence: Synthetic peptide"
ARRKVGKGVYYALDY

SEQ ID NO: 1071 - protein, 10 aa, Artificial Sequence
  source: /note="Description of Artificial Sequence: Synthetic peptide"
GYTFTNYWMH

SEQ ID NO: 1072 - protein, 17 aa, Artificial Sequence
  source: /note="Description of Artificial Sequence: Synthetic peptide"
FITPTTGYPEYNQKFKD

SEQ ID NO: 1073 - protein, 13 aa, Artificial Sequence
  source: /note="Description of Artificial Sequence: Synthetic peptide"
RKVGKGVYYALDY

SEQ ID NO: 1074 - protein, 122 aa, Artificial Sequence; identical to SEQ ID NO: 1018
  source: /note="Description of Artificial Sequence: Synthetic polypeptide"

SEQ ID NO: 1075 - protein, 11 aa, Artificial Sequence
  source: /note="Description of Artificial Sequence: Synthetic peptide"
RASGNIHNYLA

SEQ ID NO: 1076 - protein, 7 aa, Artificial Sequence
  source: /note="Description of Artificial Sequence: Synthetic peptide"
NTKTLAD

SEQ ID NO: 1077 - protein, 9 aa, Artificial Sequence
  source: /note="Description of Artificial Sequence: Synthetic peptide"
QHFWSSPWT

SEQ ID NO: 1078 - protein, 7 aa, Artificial Sequence
  source: /note="Description of Artificial Sequence: Synthetic peptide"
SGNIHNY

SEQ ID NO: 1079 - protein, 3 aa, Artificial Sequence
  source: /note="Description of Artificial Sequence: Synthetic peptide"
NTK

SEQ ID NO: 1080 - protein, 6 aa, Artificial Sequence
  source: /note="Description of Artificial Sequence: Synthetic peptide"
FWSSPW

SEQ ID NO: 1081 - protein, 6 aa, Artificial Sequence
  source: /note="Description of Artificial Sequence: Synthetic peptide"
GNIHNY

SEQ ID NO: 1082 - protein, 3 aa, Artificial Sequence
  source: /note="Description of Artificial Sequence: Synthetic peptide"
NTK

SEQ ID NO: 1083 - protein, 9 aa, Artificial Sequence
  source: /note="Description of Artificial Sequence: Synthetic peptide"
QHFWSSPWT

SEQ ID NO: 1084 - protein, 11 aa, Artificial Sequence
  source: /note="Description of Artificial Sequence: Synthetic peptide"
RASGNIHNYLA

SEQ ID NO: 1085 - protein, 7 aa, Artificial Sequence
  source: /note="Description of Artificial Sequence: Synthetic peptide"
NTKTLAD

SEQ ID NO: 1086 - protein, 9 aa, Artificial Sequence
  source: /note="Description of Artificial Sequence: Synthetic peptide"
QHFWSSPWT

SEQ ID NO: 1087 - protein, 107 aa, Artificial Sequence; identical to SEQ ID NO: 1059
  source: /note="Description of Artificial Sequence: Synthetic polypeptide"

SEQ ID NO: 1088 - protein, 249 aa, Artificial Sequence
  source: /note="Description of Artificial Sequence: Synthetic polypeptide"
QVQLVQSGAEVKKPGSSVKVSCKASGYTFTNYWMHWVRQAPGQGLEWMGFITPTTGYPEYNQKFKDRVTITADKSTSTAYMELSSLRSEDTAVYYCARRKVGKGVYYALDYWGQGTTVTVSSGGGGSGGGGSGGGGSGGGGSAIRMTQSPFSLSASVGDRVTITCRASGNIHNYLAWYQQKPAKAPKLFIYNTKTLADGVPSRFSGSGSGTDYTLTISSLQPEDFATYYCQHFWSSPWTFGGGTKVEIK

SEQ ID NO: 1089 - protein, 493 aa, Artificial Sequence
  source: /note="Description of Artificial Sequence: Synthetic polypeptide"
MALPVTALLLPLALLLHAARPQVQLVQSGAEVKKPGSSVKVSCKASGYTFTNYWMHWVRQAPGQGLEWMGFITPTTGYPEYNQKFKDRVTITADKSTSTAYMELSSLRSEDTAVYYCARRKVGKGVYYALDYWGQGTTVTVSSGGGGSGGGGSGGGGSGGGGSAIRMTQSPFSLSASVGDRVTITCRASGNIHNYLAWYQQKPAKAPKLFIYNTKTLADGVPSRFSGSGSGTDYTLTISSLQPEDFATYYCQHFWSSPWTFGGGTKVEIKTTTPAPRPPTPAPTIASQPLSLRPEACRPAAGGAVHTRGLDFACDIYIWAPLAGTCGVLLLSLVITLYCKRGRKKLLYIFKQPFMRPVQTTQEEDGCSCRFPEEEEGGCELRVKFSRSADAPAYQQGQNQLYNELNLGRREEYDVLDKRRGRDPEMGGKPRRKNPQEGLYNELQKDKMAEAYSEIGMKGERRRGKGHDGLYQGLSTATKDTYDALHMQALPPR

SEQ ID NO: 1090 - protein, 5 aa, Artificial Sequence
  source: /note="Description of Artificial Sequence: Synthetic peptide"
SYNMH

SEQ ID NO: 1091 - protein, 17 aa, Artificial Sequence
  source: /note="Description of Artificial Sequence: Synthetic peptide"
AIYPGNGDTSYNPKFKG

SEQ ID NO: 1092 - protein, 13 aa, Artificial Sequence
  source: /note="Description of Artificial Sequence: Synthetic peptide"
SYFYGSSSWYFDV

SEQ ID NO: 1093 - protein, 7 aa, Artificial Sequence
  source: /note="Description of Artificial Sequence: Synthetic peptide"
GYTFTSY

SEQ ID NO: 1094 - protein, 6 aa, Artificial Sequence
  source: /note="Description of Artificial Sequence: Synthetic peptide"
YPGNGD

SEQ ID NO: 1095 - protein, 13 aa, Artificial Sequence
  source: /note="Description of Artificial Sequence: Synthetic peptide"
SYFYGSSSWYFDV

SEQ ID NO: 1096 - protein, 8 aa, Artificial Sequence
  source: /note="Description of Artificial Sequence: Synthetic peptide"
GYTFTSYN

SEQ ID NO: 1097 - protein, 8 aa, Artificial Sequence
  source: /note="Description of Artificial Sequence: Synthetic peptide"
IYPGNGDT

SEQ ID NO: 1098 - protein, 15 aa, Artificial Sequence
  source: /note="Description of Artificial Sequence: Synthetic peptide"
ARSYFYGSSSWYFDV

SEQ ID NO: 1099 - protein, 10 aa, Artificial Sequence
  source: /note="Description of Artificial Sequence: Synthetic peptide"
GYTFTSYNMH

SEQ ID NO: 1100 - protein, 17 aa, Artificial Sequence
  source: /note="Description of Artificial Sequence: Synthetic peptide"
AIYPGNGDTSYNPKFKG

SEQ ID NO: 1101 - protein, 13 aa, Artificial Sequence
  source: /note="Description of Artificial Sequence: Synthetic peptide"
SYFYGSSSWYFDV

SEQ ID NO: 1102 - protein, 122 aa, Artificial Sequence; identical to SEQ ID NO: 801
  source: /note="Description of Artificial Sequence: Synthetic polypeptide"

SEQ ID NO: 1103 - protein, 10 aa, Artificial Sequence
  source: /note="Description of Artificial Sequence: Synthetic peptide"
RASSSVSSMH

SEQ ID NO: 1104 - protein, 7 aa, Artificial Sequence
  source: /note="Description of Artificial Sequence: Synthetic peptide"
ATSNLAS

SEQ ID NO: 1105 - protein, 9 aa, Artificial Sequence
  source: /note="Description of Artificial Sequence: Synthetic peptide"
QQWIFNPPT

SEQ ID NO: 1106 - protein, 6 aa, Artificial Sequence
  source: /note="Description of Artificial Sequence: Synthetic peptide"
SSSVSS

SEQ ID NO: 1107 - protein, 3 aa, Artificial Sequence
  source: /note="Description of Artificial Sequence: Synthetic peptide"
ATS

SEQ ID NO: 1108 - protein, 6 aa, Artificial Sequence
  source: /note="Description of Artificial Sequence: Synthetic peptide"
WIFNPP

SEQ ID NO: 1109 - protein, 5 aa, Artificial Sequence
  source: /note="Description of Artificial Sequence: Synthetic peptide"
SSVSS

SEQ ID NO: 1110 - protein, 3 aa, Artificial Sequence
  source: /note="Description of Artificial Sequence: Synthetic peptide"
ATS

SEQ ID NO: 1111 - protein, 9 aa, Artificial Sequence
  source: /note="Description of Artificial Sequence: Synthetic peptide"
QQWIFNPPT

SEQ ID NO: 1112 - protein, 10 aa, Artificial Sequence
  source: /note="Description of Artificial Sequence: Synthetic peptide"
RASSSVSSMH

SEQ ID NO: 1113 - protein, 7 aa, Artificial Sequence
  source: /note="Description of Artificial Sequence: Synthetic peptide"
ATSNLAS

SEQ ID NO: 1114 - protein, 9 aa, Artificial Sequence
  source: /note="Description of Artificial Sequence: Synthetic peptide"
QQWIFNPPT

SEQ ID NO: 1115 - protein, 106 aa, Artificial Sequence
  source: /note="Description of Artificial Sequence: Synthetic polypeptide"
DIQLTQSPSFLSASVGDRVTITCRASSSVSSMHWYQQKPGKAPKPLIFATSNLASGVPSRFSGSGSGTEYTLTISSLQPEDFATYYCQQWIFNPPTFGGGTKVEIK

SEQ ID NO: 1116 - protein, 248 aa, Artificial Sequence
  source: /note="Description of Artificial Sequence: Synthetic polypeptide"
QVQLVQSGAEVKKPGASVKVSCKASGYTFTSYNMHWVRQAPGQGLEWMGAIYPGNGDTSYNPKFKGRVTMTADKSTRTAYMELSSLRSEDTAVYYCARSYFYGSSSWYFDVWGQGTTVTVSSGGGGSGGGGSGGGGSGGGGSDIQLTQSPSFLSASVGDRVTITCRASSSVSSMHWYQQKPGKAPKPLIFATSNLASGVPSRFSGSGSGTEYTLTISSLQPEDFATYYCQQWIFNPPTFGGGTKVEIK

SEQ ID NO: 1117 - protein, 492 aa, Artificial Sequence
  source: /note="Description of Artificial Sequence: Synthetic polypeptide"
MALPVTALLLPLALLLHAARPQVQLVQSGAEVKKPGASVKVSCKASGYTFTSYNMHWVRQAPGQGLEWMGAIYPGNGDTSYNPKFKGRVTMTADKSTRTAYMELSSLRSEDTAVYYCARSYFYGSSSWYFDVWGQGTTVTVSSGGGGSGGGGSGGGGSGGGGSDIQLTQSPSFLSASVGDRVTITCRASSSVSSMHWYQQKPGKAPKPLIFATSNLASGVPSRFSGSGSGTEYTLTISSLQPEDFATYYCQQWIFNPPTFGGGTKVEIKTTTPAPRPPTPAPTIASQPLSLRPEACRPAAGGAVHTRGLDFACDIYIWAPLAGTCGVLLLSLVITLYCKRGRKKLLYIFKQPFMRPVQTTQEEDGCSCRFPEEEEGGCELRVKFSRSADAPAYQQGQNQLYNELNLGRREEYDVLDKRRGRDPEMGGKPRRKNPQEGLYNELQKDKMAEAYSEIGMKGERRRGKGHDGLYQGLSTATKDTYDALHMQALPPR

SEQ ID NO: 1118 - protein, 5 aa, Artificial Sequence
  source: /note="Description of Artificial Sequence: Synthetic peptide"
SYNMH

SEQ ID NO: 1119 - protein, 17 aa, Artificial Sequence
  source: /note="Description of Artificial Sequence: Synthetic peptide"
AIYPGNGDTSYNPKFKG

SEQ ID NO: 1120 - protein, 13 aa, Artificial Sequence
  source: /note="Description of Artificial Sequence: Synthetic peptide"
SYFYGSSSWYFDV

SEQ ID NO: 1121 - protein, 7 aa, Artificial Sequence
  source: /note="Description of Artificial Sequence: Synthetic peptide"
GYTFTSY

SEQ ID NO: 1122 - protein, 6 aa, Artificial Sequence
  source: /note="Description of Artificial Sequence: Synthetic peptide"
YPGNGD

SEQ ID NO: 1123 - protein, 13 aa, Artificial Sequence
  source: /note="Description of Artificial Sequence: Synthetic peptide"
SYFYGSSSWYFDV

SEQ ID NO: 1124 - protein, 8 aa, Artificial Sequence
  source: /note="Description of Artificial Sequence: Synthetic peptide"
GYTFTSYN

SEQ ID NO: 1125 - protein, 8 aa, Artificial Sequence
  source: /note="Description of Artificial Sequence: Synthetic peptide"
IYPGNGDT

SEQ ID NO: 1126 - protein, 15 aa, Artificial Sequence
  source: /note="Description of Artificial Sequence: Synthetic peptide"
ARSYFYGSSSWYFDV

SEQ ID NO: 1127 - protein, 10 aa, Artificial Sequence
  source: /note="Description of Artificial Sequence: Synthetic peptide"
GYTFTSYNMH

SEQ ID NO: 1128 - protein, 17 aa, Artificial Sequence
  source: /note="Description of Artificial Sequence: Synthetic peptide"
AIYPGNGDTSYNPKFKG

SEQ ID NO: 1129 - protein, 13 aa, Artificial Sequence
  source: /note="Description of Artificial Sequence: Synthetic peptide"
SYFYGSSSWYFDV

SEQ ID NO: 1130 - protein, 122 aa, Artificial Sequence
  source: /note="Description of Artificial Sequence: Synthetic polypeptide"
QVQLVQSGAEVKKPGSSVKVSCKASGYTFTSYNMHWVRQAPGQGLEWMGAIYPGNGDTSYNPKFKGRVTITADKSTRTAYMELSSLRSEDTAVYYCARSYFYGSSSWYFDVWGQGTTVTVSS

SEQ ID NO: 1131 - protein, 10 aa, Artificial Sequence
  source: /note="Description of Artificial Sequence: Synthetic peptide"
RASSSVSSMH

SEQ ID NO: 1132 - protein, 7 aa, Artificial Sequence
  source: /note="Description of Artificial Sequence: Synthetic peptide"
ATSNLAS

SEQ ID NO: 1133 - protein, 9 aa, Artificial Sequence
  source: /note="Description of Artificial Sequence: Synthetic peptide"
QQWIFNPPT

SEQ ID NO: 1134 - protein, 6 aa, Artificial Sequence
  source: /note="Description of Artificial Sequence: Synthetic peptide"
SSSVSS

SEQ ID NO: 1135 - protein, 3 aa, Artificial Sequence
  source: /note="Description of Artificial Sequence: Synthetic peptide"
ATS

SEQ ID NO: 1136 - protein, 6 aa, Artificial Sequence
  source: /note="Description of Artificial Sequence: Synthetic peptide"
WIFNPP

SEQ ID NO: 1137 - protein, 5 aa, Artificial Sequence
  source: /note="Description of Artificial Sequence: Synthetic peptide"
SSVSS

SEQ ID NO: 1138 - protein, 3 aa, Artificial Sequence
  source: /note="Description of Artificial Sequence: Synthetic peptide"
ATS

SEQ ID NO: 1139 - protein, 9 aa, Artificial Sequence
  source: /note="Description of Artificial Sequence: Synthetic peptide"
QQWIFNPPT

SEQ ID NO: 1140 - protein, 10 aa, Artificial Sequence
  source: /note="Description of Artificial Sequence: Synthetic peptide"
RASSSVSSMH

SEQ ID NO: 1141 - protein, 7 aa, Artificial Sequence
  source: /note="Description of Artificial Sequence: Synthetic peptide"
ATSNLAS

SEQ ID NO: 1142 - protein, 9 aa, Artificial Sequence
  source: /note="Description of Artificial Sequence: Synthetic peptide"
QQWIFNPPT

SEQ ID NO: 1143 - protein, 106 aa, Artificial Sequence; identical to SEQ ID NO: 807
  source: /note="Description of Artificial Sequence: Synthetic polypeptide"

SEQ ID NO: 1144 - protein, 248 aa, Artificial Sequence
  source: /note="Description of Artificial Sequence: Synthetic polypeptide"
QVQLVQSGAEVKKPGSSVKVSCKASGYTFTSYNMHWVRQAPGQGLEWMGAIYPGNGDTSYNPKFKGRVTITADKSTRTAYMELSSLRSEDTAVYYCARSYFYGSSSWYFDVWGQGTTVTVSSGGGGSGGGGSGGGGSGGGGSEIVLTQSPATLSLSPGERATLSCRASSSVSSMHWYQQKPGQAPRPLIFATSNLASGIPARFSGSGSGTDYTLTISSLEPEDAAVYYCQQWIFNPPTFGGGTKVEIK

SEQ ID NO: 1145 - protein, 492 aa, Artificial Sequence
  source: /note="Description of Artificial Sequence: Synthetic polypeptide"
MALPVTALLLPLALLLHAARPQVQLVQSGAEVKKPGSSVKVSCKASGYTFTSYNMHWVRQAPGQGLEWMGAIYPGNGDTSYNPKFKGRVTITADKSTRTAYMELSSLRSEDTAVYYCARSYFYGSSSWYFDVWGQGTTVTVSSGGGGSGGGGSGGGGSGGGGSEIVLTQSPATLSLSPGERATLSCRASSSVSSMHWYQQKPGQAPRPLIFATSNLASGIPARFSGSGSGTDYTLTISSLEPEDAAVYYCQQWIFNPPTFGGGTKVEIKTTTPAPRPPTPAPTIASQPLSLRPEACRPAAGGAVHTRGLDFACDIYIWAPLAGTCGVLLLSLVITLYCKRGRKKLLYIFKQPFMRPVQTTQEEDGCSCRFPEEEEGGCELRVKFSRSADAPAYQQGQNQLYNELNLGRREEYDVLDKRRGRDPEMGGKPRRKNPQEGLYNELQKDKMAEAYSEIGMKGERRRGKGHDGLYQGLSTATKDTYDALHMQALPPR

SEQ ID NO: 1146 - protein, 5 aa, Artificial Sequence
  source: /note="Description of Artificial Sequence: Synthetic peptide"
SYNMH

SEQ ID NO: 1147 - protein, 17 aa, Artificial Sequence
  source: /note="Description of Artificial Sequence: Synthetic peptide"
AIYPGNGDTSYNPKFKG

SEQ ID NO: 1148 - protein, 13 aa, Artificial Sequence
  source: /note="Description of Artificial Sequence: Synthetic peptide"
SYFYGSSSWYFDV

SEQ ID NO: 1149 - protein, 7 aa, Artificial Sequence
  source: /note="Description of Artificial Sequence: Synthetic peptide"
GYTFTSY

SEQ ID NO: 1150 - protein, 6 aa, Artificial Sequence
  source: /note="Description of Artificial Sequence: Synthetic peptide"
YPGNGD

SEQ ID NO: 1151 - protein, 13 aa, Artificial Sequence
  source: /note="Description of Artificial Sequence: Synthetic peptide"
SYFYGSSSWYFDV

SEQ ID NO: 1152 - protein, 8 aa, Artificial Sequence
  source: /note="Description of Artificial Sequence: Synthetic peptide"
GYTFTSYN

SEQ ID NO: 1153 - protein, 8 aa, Artificial Sequence
  source: /note="Description of Artificial Sequence: Synthetic peptide"
IYPGNGDT

SEQ ID NO: 1154 - protein, 15 aa, Artificial Sequence
  source: /note="Description of Artificial Sequence: Synthetic peptide"
ARSYFYGSSSWYFDV

SEQ ID NO: 1155 - protein, 10 aa, Artificial Sequence
  source: /note="Description of Artificial Sequence: Synthetic peptide"
GYTFTSYNMH

SEQ ID NO: 1156 - protein, 17 aa, Artificial Sequence
  source: /note="Description of Artificial Sequence: Synthetic peptide"
AIYPGNGDTSYNPKFKG

SEQ ID NO: 1157 - protein, 13 aa, Artificial Sequence
  source: /note="Description of Artificial Sequence: Synthetic peptide"
SYFYGSSSWYFDV

SEQ ID NO: 1158 - protein, 122 aa, Artificial Sequence; identical to SEQ ID NO: 1130
  source: /note="Description of Artificial Sequence: Synthetic polypeptide"

SEQ ID NO: 1159 - protein, 10 aa, Artificial Sequence
  source: /note="Description of Artificial Sequence: Synthetic peptide"
RASSSVSSMH

SEQ ID NO: 1160 - protein, 7 aa, Artificial Sequence
  source: /note="Description of Artificial Sequence: Synthetic peptide"
ATSNLAS

SEQ ID NO: 1161 - protein, 9 aa, Artificial Sequence
  source: /note="Description of Artificial Sequence: Synthetic peptide"
QQWIFNPPT

SEQ ID NO: 1162 - protein, 6 aa, Artificial Sequence
  source: /note="Description of Artificial Sequence: Synthetic peptide"
SSSVSS

SEQ ID NO: 1163 - protein, 3 aa, Artificial Sequence
  source: /note="Description of Artificial Sequence: Synthetic peptide"
ATS

SEQ ID NO: 1164 - protein, 6 aa, Artificial Sequence
  source: /note="Description of Artificial Sequence: Synthetic peptide"
WIFNPP

SEQ ID NO: 1165 - protein, 5 aa, Artificial Sequence
  source: /note="Description of Artificial Sequence: Synthetic peptide"
SSVSS

SEQ ID NO: 1166 - protein, 3 aa, Artificial Sequence
  source: /note="Description of Artificial Sequence: Synthetic peptide"
ATS

SEQ ID NO: 1167 - protein, 9 aa, Artificial Sequence
  source: /note="Description of Artificial Sequence: Synthetic peptide"
QQWIFNPPT

SEQ ID NO: 1168 - protein, 10 aa, Artificial Sequence
  source: /note="Description of Artificial Sequence: Synthetic peptide"
RASSSVSSMH

SEQ ID NO: 1169 - protein, 7 aa, Artificial Sequence
  source: /note="Description of Artificial Sequence: Synthetic peptide"
ATSNLAS

SEQ ID NO: 1170 - protein, 9 aa, Artificial Sequence
  source: /note="Description of Artificial Sequence: Synthetic peptide"
QQWIFNPPT

SEQ ID NO: 1171 - protein, 106 aa, Artificial Sequence; identical to SEQ ID NO: 1115
  source: /note="Description of Artificial Sequence: Synthetic polypeptide"

SEQ ID NO: 1172 - protein, 248 aa, Artificial Sequence
  source: /note="Description of Artificial Sequence: Synthetic polypeptide"
QVQLVQSGAEVKKPGSSVKVSCKASGYTFTSYNMHWVRQAPGQGLEWMGAIYPGNGDTSYNPKFKGRVTITADKSTRTAYMELSSLRSEDTAVYYCARSYFYGSSSWYFDVWGQGTTVTVSSGGGGSGGGGSGGGGSGGGGSDIQLTQSPSFLSASVGDRVTITCRASSSVSSMHWYQQKPGKAPKPLIFATSNLASGVPSRFSGSGSGTEYTLTISSLQPEDFATYYCQQWIFNPPTFGGGTKVEIK

SEQ ID NO: 1173 - protein, 492 aa, Artificial Sequence
  source: /note="Description of Artificial Sequence: Synthetic polypeptide"
MALPVTALLLPLALLLHAARPQVQLVQSGAEVKKPGSSVKVSCKASGYTFTSYNMHWVRQAPGQGLEWMGAIYPGNGDTSYNPKFKGRVTITADKSTRTAYMELSSLRSEDTAVYYCARSYFYGSSSWYFDVWGQGTTVTVSSGGGGSGGGGSGGGGSGGGGSDIQLTQSPSFLSASVGDRVTITCRASSSVSSMHWYQQKPGKAPKPLIFATSNLASGVPSRFSGSGSGTEYTLTISSLQPEDFATYYCQQWIFNPPTFGGGTKVEIKTTTPAPRPPTPAPTIASQPLSLRPEACRPAAGGAVHTRGLDFACDIYIWAPLAGTCGVLLLSLVITLYCKRGRKKLLYIFKQPFMRPVQTTQEEDGCSCRFPEEEEGGCELRVKFSRSADAPAYQQGQNQLYNELNLGRREEYDVLDKRRGRDPEMGGKPRRKNPQEGLYNELQKDKMAEAYSEIGMKGERRRGKGHDGLYQGLSTATKDTYDALHMQALPPR

SEQ ID NO: 1174 - protein, 122 aa, Artificial Sequence
  source: /note="Description of Artificial Sequence: Synthetic polypeptide"
QVQLQQPGAELVKPGASVKMSCKASGYTFTNYNLHWVKQTPGQGLEWIGAIYPGNYDTSYNQKFKGKATLTADKSSSTAYMLLSSLTSEDSAVYFCARVDFGHSRYWYFDVWGAGTTVTVSS

SEQ ID NO: 1175 - protein, 106 aa, Artificial Sequence
  source: /note="Description of Artificial Sequence: Synthetic polypeptide"
QIVLSQSPAILSASPGEKVTMTCRATSSVSSMNWYQQKPGSFPRPWIHATSNLASGVPARFSGSGSGTSYSLTISRVEAEDAATYYCQQWTFNPPTFGAGAKLELK

SEQ ID NO: 1176 - protein, 122 aa, Artificial Sequence
  source: /note="Description of Artificial Sequence: Synthetic polypeptide"
QVQLQQPGAELVKPGASVKMSCKASGYTFTSYNMHWVKQTPGQGLEWIGAIYPGNGDTSYNPKFKGKATLTADKSSRTAYIHLSSLTSEDSVVYYCARSYFYGSSSWYFDVWGAGTTVTVSS

SEQ ID NO: 1177 - protein, 106 aa, Artificial Sequence
  source: /note="Description of Artificial Sequence: Synthetic polypeptide"
QIILSQSPAILSASPGEKVTLTCRASSSVSSMHWYQQKPGSSPKPWIFATSNLASGVPARFTGSGSGTSYSLTISRVEAEDAATYYCQQWIFNPPTFGGGTSLEIK

SEQ ID NO: 1178 - protein, 122 aa, Artificial Sequence
  source: /note="Description of Artificial Sequence: Synthetic polypeptide"
QVHLQQSGAELAKPGASVKMSCKASGYTFTNYWMHWVKQRPGQGLEWIGFITPTTGYPEYNQKFKDKATLTADKSSSTAYMQLSSLTSEDSAVYYCARRKVGKGVYYALDYWGQGTSVTVSS

SEQ ID NO: 1179 - protein, 107 aa, Artificial Sequence
  source: /note="Description of Artificial Sequence: Synthetic polypeptide"
DILMTQSPASLSASVGETVTITCRASGNIHNYLAWYQQKQGNSPQLLVYNTKTLADGVPSRFSGSGSGTQYSLKINSLQTEDFGTYYCQHFWSSPWTFGGGTKLEIK

SEQ ID NO: 1180 - protein, 9 aa, Artificial Sequence
  source: /note="Description of Artificial Sequence: Synthetic peptide"
GDSMLSNSD

SEQ ID NO: 1181 - protein, 7 aa, Artificial Sequence
  source: /note="Description of Artificial Sequence: Synthetic peptide"
YHRSTWY

SEQ ID NO: 1182 - protein, 15 aa, Artificial Sequence
  source: /note="Description of Artificial Sequence: Synthetic peptide"
VRLQDGNSWSDAFDV

SEQ ID NO: 1183 - protein, 10 aa, Artificial Sequence
  source: /note="Description of Artificial Sequence: Synthetic peptide"
GDSMLSNSDT

SEQ ID NO: 1184 - protein, 9 aa, Artificial Sequence
  source: /note="Description of Artificial Sequence: Synthetic peptide"
TYHRSTWYD

SEQ ID NO: 1185 - protein, 17 aa, Artificial Sequence
  source: /note="Description of Artificial Sequence: Synthetic peptide"
ARVRLQDGNSWSDAFDV

SEQ ID NO: 1186 - protein, 14 aa, Artificial Sequence
  source: /note="Description of Artificial Sequence: Synthetic peptide"
TGTSSDVGGYNYVS

SEQ ID NO: 1187 - protein, 10 aa, Artificial Sequence
  source: /note="Description of Artificial Sequence: Synthetic peptide"
TSSDVGGYNY

SEQ ID NO: 1188 - protein, 9 aa, Artificial Sequence
  source: /note="Description of Artificial Sequence: Synthetic peptide"
SSDVGGYNY

SEQ ID NO: 1189 - protein, 7 aa, Artificial Sequence
  source: /note="Description of Artificial Sequence: Synthetic peptide"
DVSNRPS

SEQ ID NO: 1190 - protein, 3 aa, Artificial Sequence
  source: /note="Description of Artificial Sequence: Synthetic peptide"
DVS

SEQ ID NO: 1191 - protein, 3 aa, Artificial Sequence
  source: /note="Description of Artificial Sequence: Synthetic peptide"
DVS

SEQ ID NO: 1192 - protein, 11 aa, Artificial Sequence
  source: /note="Description of Artificial Sequence: Synthetic peptide"
SSYTSSSTLYV

SEQ ID NO: 1193 - protein, 8 aa, Artificial Sequence
  source: /note="Description of Artificial Sequence: Synthetic peptide"
YTSSSTLY

SEQ ID NO: 1194 - protein, 11 aa, Artificial Sequence
  source: /note="Description of Artificial Sequence: Synthetic peptide"
SSYTSSSTLYV

SEQ ID NO: 1195 - protein, 243 aa, Artificial Sequence; identical to SEQ ID NO: 846
  source: /note="Description of Artificial Sequence: Synthetic polypeptide"

SEQ ID NO: 1196 - protein, 238 aa, Artificial Sequence
  source: /note="Description of Artificial Sequence: Synthetic polypeptide"
EVQLQQSGPGLVKPSQTLSLTCAISGDSMLSNSDTWNWIRQSPSRGLEWLGRTYHRSTWYDDYASSVRGRVSINVDTSKNQYSLQLNAVTPEDTGVYYCARVRLQDGNSWSDAFDVWGQGTMVTVSSQSALTQPASASGSPGQSVTISCTGTSSDVGGYNYVSWYQQHPGKAPKLMIYDVSNRPSGVSNRFSGSKSGNTASLTISGLQAEDEADYYCSSYTSSSTLYVFGTGTQLTVL

SEQ ID NO: 1197 - protein, 127 aa, Artificial Sequence
  source: /note="Description of Artificial Sequence: Synthetic polypeptide"
EVQLQQSGPGLVKPSQTLSLTCAISGDSMLSNSDTWNWIRKSPSRGLEWLGRTYHRSTWYDDYASSVRGRVSINVDTSKNQYSLQLNAVTPEDTGVYYCARVRLQDGNSWSDAFDVWGQGTMVTVSS

SEQ ID NO: 1198 - protein, 111 aa, Artificial Sequence
  source: /note="Description of Artificial Sequence: Synthetic polypeptide"
QSALTQPASASGSPGQSVTISCTGTSSDVGGYNYVSWYQDHPGKAPKLMIYDVSNRPSGVSNRFSGSKSGNTASLTISGLQAEDEADYYCSSYTSSSTLYVFGTGTQLTVL

SEQ ID NO: 1199 - protein, 243 aa, Artificial Sequence
  source: /note="Description of Artificial Sequence: Synthetic polypeptide"
EVQLQQSGPGLVKPSQTLSLTCAISGDSMLSNSDTWNWIRKSPSRGLEWLGRTYHRSTWYDDYASSVRGRVSINVDTSKNQYSLQLNAVTPEDTGVYYCARVRLQDGNSWSDAFDVWGQGTMVTVSSGGGGSQSALTQPASASGSPGQSVTISCTGTSSDVGGYNYVSWYQDHPGKAPKLMIYDVSNRPSGVSNRFSGSKSGNTASLTISGLQAEDEADYYCSSYTSSSTLYVFGTGTQLTVL

SEQ ID NO: 1200 - protein, 7 aa, Artificial Sequence
  source: /note="Description of Artificial Sequence: Synthetic peptide"
SNSDTWN

SEQ ID NO: 1201 - protein, 18 aa, Artificial Sequence
  source: /note="Description of Artificial Sequence: Synthetic peptide"
RTYHRSTWYDDYASSVRG

SEQ ID NO: 1202 - protein, 15 aa, Artificial Sequence
  source: /note="Description of Artificial Sequence: Synthetic peptide"
VRLQDGNSWSDAFDV

SEQ ID NO: 1203 - protein, 9 aa, Artificial Sequence
  source: /note="Description of Artificial Sequence: Synthetic peptide"
GDSVLSNSD

SEQ ID NO: 1204 - protein, 7 aa, Artificial Sequence
  source: /note="Description of Artificial Sequence: Synthetic peptide"
YHRSTWY

SEQ ID NO: 1205 - protein, 15 aa, Artificial Sequence
  source: /note="Description of Artificial Sequence: Synthetic peptide"
VRLQDGNSWSDAFDV

SEQ ID NO: 1206 - protein, 10 aa, Artificial Sequence
  source: /note="Description of Artificial Sequence: Synthetic peptide"
GDSVLSNSDT

SEQ ID NO: 1207 - protein, 9 aa, Artificial Sequence
  source: /note="Description of Artificial Sequence: Synthetic peptide"
TYHRSTWYD

SEQ ID NO: 1208 - protein, 17 aa, Artificial Sequence
  source: /note="Description of Artificial Sequence: Synthetic peptide"
ARVRLQDGNSWSDAFDV

SEQ ID NO: 1209 - protein, 12 aa, Artificial Sequence
  source: /note="Description of Artificial Sequence: Synthetic peptide"
GDSVLSNSDTWN

SEQ ID NO: 1210 - protein, 18 aa, Artificial Sequence
  source: /note="Description of Artificial Sequence: Synthetic peptide"
RTYHRSTWYDDYASSVRG

SEQ ID NO: 1211 - protein, 15 aa, Artificial Sequence
  source: /note="Description of Artificial Sequence: Synthetic peptide"
VRLQDGNSWSDAFDV

SEQ ID NO: 1212 - protein, 127 aa, Artificial Sequence
  source: /note="Description of Artificial Sequence: Synthetic polypeptide"
EVQLQQSGPGLVKPSQTLPLTCAISGDSVLSNSDTWNWIRQSPSRGLEWLGRTYHRSTWYDDYASSVRGRVSINVDTSKNQYSLQLNAVTPEDTGVYYCARVRLQDGNSWSDAFDVWGQGTMVTVSS

SEQ ID NO: 1213 - protein, 14 aa, Artificial Sequence
  source: /note="Description of Artificial Sequence: Synthetic peptide"
TGTSSDVGGYNYVS

SEQ ID NO: 1214 - protein, 7 aa, Artificial Sequence
  source: /note="Description of Artificial Sequence: Synthetic peptide"
DVSNRPS

SEQ ID NO: 1215 - protein, 11 aa, Artificial Sequence
  source: /note="Description of Artificial Sequence: Synthetic peptide"
SSYTSSSTLYV

SEQ ID NO: 1216 - protein, 10 aa, Artificial Sequence
  source: /note="Description of Artificial Sequence: Synthetic peptide"
TSSDVGGYNY

SEQ ID NO: 1217 - protein, 3 aa, Artificial Sequence
  source: /note="Description of Artificial Sequence: Synthetic peptide"
DVS

SEQ ID NO: 1218 - protein, 8 aa, Artificial Sequence
  source: /note="Description of Artificial Sequence: Synthetic peptide"
YTSSSTLY

SEQ ID NO: 1219 - protein, 9 aa, Artificial Sequence
  source: /note="Description of Artificial Sequence: Synthetic peptide"
SSDVGGYNY

SEQ ID NO: 1220 - protein, 3 aa, Artificial Sequence
  source: /note="Description of Artificial Sequence: Synthetic peptide"
DVS

SEQ ID NO: 1221 - protein, 11 aa, Artificial Sequence
  source: /note="Description of Artificial Sequence: Synthetic peptide"
SSYTSSSTLYV

SEQ ID NO: 1222 - protein, 14 aa, Artificial Sequence
  source: /note="Description of Artificial Sequence: Synthetic peptide"
TGTSSDVGGYNYVS

SEQ ID NO: 1223 - protein, 7 aa, Artificial Sequence
  source: /note="Description of Artificial Sequence: Synthetic peptide"
DVSNRPS

SEQ ID NO: 1224 - protein, 11 aa, Artificial Sequence
  source: /note="Description of Artificial Sequence: Synthetic peptide"
SSYTSSSTLYV

SEQ ID NO: 1225 - protein, 111 aa, Artificial Sequence; identical to SEQ ID NO: 755
  source: /note="Description of Artificial Sequence: Synthetic polypeptide"

SEQ ID NO: 1226 - protein, 253 aa, Artificial Sequence
  source: /note="Description of Artificial Sequence: Synthetic polypeptide"
EVQLQQSGPGLVKPSQTLPLTCAISGDSVLSNSDTWNWIRQSPSRGLEWLGRTYHRSTWYDDYASSVRGRVSINVDTSKNQYSLQLNAVTPEDTGVYYCARVRLQDGNSWSDAFDVWGQGTMVTVSSGGGGSGGGGSGGGGPQSALTQPASASGSPGQSVTISCTGTSSDVGGYNYVSWYQQHPGKAPKLMIYDVSNRPSGVSNRFSGSKSGNTASLTISGLQAEDEADYYCSSYTSSSTLYVFGTGTQLTVL

SEQ ID NO: 1227 - protein, 7 aa, Artificial Sequence
  source: /note="Description of Artificial Sequence: Synthetic peptide"
NNNAAWN

SEQ ID NO: 1228 - protein, 18 aa, Artificial Sequence
  source: /note="Description of Artificial Sequence: Synthetic peptide"
RTYHRSTWYNDYVGSVKS

SEQ ID NO: 1229 - protein, 12 aa, Artificial Sequence
  source: /note="Description of Artificial Sequence: Synthetic peptide"
ETDYGDYGAFDI

SEQ ID NO: 1230 - protein, 9 aa, Artificial Sequence
  source: /note="Description of Artificial Sequence: Synthetic peptide"
GDSVSNNNA

SEQ ID NO: 1231 - protein, 7 aa, Artificial Sequence
  source: /note="Description of Artificial Sequence: Synthetic peptide"
YHRSTWY

SEQ ID NO: 1232 - protein, 12 aa, Artificial Sequence
  source: /note="Description of Artificial Sequence: Synthetic peptide"
ETDYGDYGAFDI

SEQ ID NO: 1233 - protein, 10 aa, Artificial Sequence
  source: /note="Description of Artificial Sequence: Synthetic peptide"
GDSVSNNNAA

SEQ ID NO: 1234 - protein, 9 aa, Artificial Sequence
  source: /note="Description of Artificial Sequence: Synthetic peptide"
TYHRSTWYN

SEQ ID NO: 1235 - protein, 14 aa, Artificial Sequence
  source: /note="Description of Artificial Sequence: Synthetic peptide"
ARETDYGDYGAFDI

SEQ ID NO: 1236 - protein, 12 aa, Artificial Sequence
  source: /note="Description of Artificial Sequence: Synthetic peptide"
GDSVSNNNAAWN

SEQ ID NO: 1237 - protein, 18 aa, Artificial Sequence
  source: /note="Description of Artificial Sequence: Synthetic peptide"
RTYHRSTWYNDYVGSVKS

SEQ ID NO: 1238 - protein, 12 aa, Artificial Sequence
  source: /note="Description of Artificial Sequence: Synthetic peptide"
ETDYGDYGAFDI

SEQ ID NO: 1239 - protein, 124 aa, Artificial Sequence
  source: /note="Description of Artificial Sequence: Synthetic polypeptide"
EVQLQQSGPGLVKPSQTLSLTCAISGDSVSNNNAAWNWIRQSPSRGLEWLGRTYHRSTWYNDYVGSVKSRITINPDTSKNQFSLQLNSVTPEDTAVYYCARETDYGDYGAFDIWGQGTTVTVSS

SEQ ID NO: 1240 - protein, 14 aa, Artificial Sequence
  source: /note="Description of Artificial Sequence: Synthetic peptide"
TGSRNDIGAYESVS

SEQ ID NO: 1241 - protein, 7 aa, Artificial Sequence
  source: /note="Description of Artificial Sequence: Synthetic peptide"
GVNNRPS

SEQ ID NO: 1242 - protein, 11 aa, Artificial Sequence
  source: /note="Description of Artificial Sequence: Synthetic peptide"
SSHTTTSTLYV

SEQ ID NO: 1243 - protein, 10 aa, Artificial Sequence
  source: /note="Description of Artificial Sequence: Synthetic peptide"
SRNDIGAYES

SEQ ID NO: 1244 - protein, 3 aa, Artificial Sequence
  source: /note="Description of Artificial Sequence: Synthetic peptide"
GVN

SEQ ID NO: 1245 - protein, 8 aa, Artificial Sequence
  source: /note="Description of Artificial Sequence: Synthetic peptide"
HTTTSTLY

SEQ ID NO: 1246 - protein, 9 aa, Artificial Sequence
  source: /note="Description of Artificial Sequence: Synthetic peptide"
RNDIGAYES

SEQ ID NO: 1247 - protein, 3 aa, Artificial Sequence
  source: /note="Description of Artificial Sequence: Synthetic peptide"
GVN

SEQ ID NO: 1248 - protein, 11 aa, Artificial Sequence
  source: /note="Description of Artificial Sequence: Synthetic peptide"
SSHTTTSTLYV

SEQ ID NO: 1249 - protein, 14 aa, Artificial Sequence
  source: /note="Description of Artificial Sequence: Synthetic peptide"
TGSRNDIGAYESVS

SEQ ID NO: 1250 - protein, 7 aa, Artificial Sequence
  source: /note="Description of Artificial Sequence: Synthetic peptide"
GVNNRPS

SEQ ID NO: 1251 - protein, 11 aa, Artificial Sequence
  source: /note="Description of Artificial Sequence: Synthetic peptide"
SSHTTTSTLYV

SEQ ID NO: 1252 - protein, 111 aa, Artificial Sequence
  source: /note="Description of Artificial Sequence: Synthetic polypeptide"
QSALTQPASVSGSPGQSITISCTGSRNDIGAYESVSWYQQHPGNAPKLIIHGVNNRPSGVFDRFSVSQSGNTASLTISGLQAEDEADYYCSSHTTTSTLYVFGTGTKVTVL

SEQ ID NO: 1253 - protein, 250 aa, Artificial Sequence
  source: /note="Description of Artificial Sequence: Synthetic polypeptide"
EVQLQQSGPGLVKPSQTLSLTCAISGDSVSNNNAAWNWIRQSPSRGLEWLGRTYHRSTWYNDYVGSVKSRITINPDTSKNQFSLQLNSVTPEDTAVYYCARETDYGDYGAFDIWGQGTTVTVSSGGGGSGGGGSGGGGSQSALTQPASVSGSPGQSITISCTGSRNDIGAYESVSWYQQHPGNAPKLIIHGVNNRPSGVFDRFSVSQSGNTASLTISGLQAEDEADYYCSSHTTTSTLYVFGTGTKVTVL

SEQ ID NO: 1254 - protein, 7 aa, Artificial Sequence
  source: /note="Description of Artificial Sequence: Synthetic peptide"
SNSAAWN

SEQ ID NO: 1255 - protein, 18 aa, Artificial Sequence
  source: /note="Description of Artificial Sequence: Synthetic peptide"
RTFYRSKWYNDYAVSVKG

SEQ ID NO: 1256 - protein, 9 aa, Artificial Sequence
  source: /note="Description of Artificial Sequence: Synthetic peptide"
GDYYYGLDV

SEQ ID NO: 1257 - protein, 9 aa, Artificial Sequence
  source: /note="Description of Artificial Sequence: Synthetic peptide"
GDSVSSNSA

SEQ ID NO: 1258 - protein, 7 aa, Artificial Sequence
  source: /note="Description of Artificial Sequence: Synthetic peptide"
FYRSKWY

SEQ ID NO: 1259 - protein, 9 aa, Artificial Sequence
  source: /note="Description of Artificial Sequence: Synthetic peptide"
GDYYYGLDV

SEQ ID NO: 1260 - protein, 10 aa, Artificial Sequence
  source: /note="Description of Artificial Sequence: Synthetic peptide"
GDSVSSNSAA

SEQ ID NO: 1261 - protein, 9 aa, Artificial Sequence
  source: /note="Description of Artificial Sequence: Synthetic peptide"
TFYRSKWYN

SEQ ID NO: 1262 - protein, 11 aa, Artificial Sequence
  source: /note="Description of Artificial Sequence: Synthetic peptide"
AGGDYYYGLDV

SEQ ID NO: 1263 - protein, 12 aa, Artificial Sequence
  source: /note="Description of Artificial Sequence: Synthetic peptide"
GDSVSSNSAAWN

SEQ ID NO: 1264 - protein, 18 aa, Artificial Sequence
  source: /note="Description of Artificial Sequence: Synthetic peptide"
RTFYRSKWYNDYAVSVKG

SEQ ID NO: 1265 - protein, 9 aa, Artificial Sequence
  source: /note="Description of Artificial Sequence: Synthetic peptide"
GDYYYGLDV

SEQ ID NO: 1266 - protein, 121 aa, Artificial Sequence
  source: /note="Description of Artificial Sequence: Synthetic polypeptide"
EVQLQQSGPGLVNPSQTLSITCAISGDSVSSNSAAWNWIRQSPSRGLEWLGRTFYRSKWYNDYAVSVKGRITISPDTSKNQFSLQLNSVTPEDTAVYYCAGGDYYYGLDVWGQGTTVTVSS

SEQ ID NO: 1267 - protein, 14 aa, Artificial Sequence
  source: /note="Description of Artificial Sequence: Synthetic peptide"
TGSSSDVGGYNSVS

SEQ ID NO: 1268 - protein, 7 aa, Artificial Sequence
  source: /note="Description of Artificial Sequence: Synthetic peptide"
EVINRPS

SEQ ID NO: 1269 - protein, 10 aa, Artificial Sequence
  source: /note="Description of Artificial Sequence: Synthetic peptide"
SSYTSSSTYV

SEQ ID NO: 1270 - protein, 10 aa, Artificial Sequence
  source: /note="Description of Artificial Sequence: Synthetic peptide"
SSSDVGGYNS

SEQ ID NO: 1271 - protein, 3 aa, Artificial Sequence
  source: /note="Description of Artificial Sequence: Synthetic peptide"
EVI

SEQ ID NO: 1272 - protein, 7 aa, Artificial Sequence
  source: /note="Description of Artificial Sequence: Synthetic peptide"
YTSSSTY

SEQ ID NO: 1273 - protein, 9 aa, Artificial Sequence
  source: /note="Description of Artificial Sequence: Synthetic peptide"
SSDVGGYNS

SEQ ID NO: 1274 - protein, 3 aa, Artificial Sequence
  source: /note="Description of Artificial Sequence: Synthetic peptide"
EVI

SEQ ID NO: 1275 - protein, 10 aa, Artificial Sequence
  source: /note="Description of Artificial Sequence: Synthetic peptide"
SSYTSSSTYV

SEQ ID NO: 1276 - protein, 14 aa, Artificial Sequence
  source: /note="Description of Artificial Sequence: Synthetic peptide"
TGSSSDVGGYNSVS

SEQ ID NO: 1277 - protein, 7 aa, Artificial Sequence
  source: /note="Description of Artificial Sequence: Synthetic peptide"
EVINRPS

SEQ ID NO: 1278 - protein, 10 aa, Artificial Sequence
  source: /note="Description of Artificial Sequence: Synthetic peptide"
SSYTSSSTYV

SEQ ID NO: 1279 - protein, 110 aa, Artificial Sequence
  source: /note="Description of Artificial Sequence: Synthetic polypeptide"
QSALTQPASVSGSPGQSITISCTGSSSDVGGYNSVSWYQQHPGKAPKLMIYEVINRPSGVSHRFSGSKSGNTASLTISGLQAEDEADYYCSSYTSSSTYVFGTGTKVTVL

SEQ ID NO: 1280 - protein, 246 aa, Artificial Sequence
  source: /note="Description of Artificial Sequence: Synthetic polypeptide"
EVQLQQSGPGLVNPSQTLSITCAISGDSVSSNSAAWNWIRQSPSRGLEWLGRTFYRSKWYNDYAVSVKGRITISPDTSKNQFSLQLNSVTPEDTAVYYCAGGDYYYGLDVWGQGTTVTVSSGGGGSGGGGSGGGGSQSALTQPASVSGSPGQSITISCTGSSSDVGGYNSVSWYQQHPGKAPKLMIYEVINRPSGVSHRFSGSKSGNTASLTISGLQAEDEADYYCSSYTSSSTYVFGTGTKVTVL

SEQ ID NO: 1281 - protein, 7 aa, Artificial Sequence
  source: /note="Description of Artificial Sequence: Synthetic peptide"
SNSDTWN

SEQ ID NO: 1282 - protein, 18 aa, Artificial Sequence
  source: /note="Description of Artificial Sequence: Synthetic peptide"
RTYHRSTWYDDYASSVRG

SEQ ID NO: 1283 - protein, 15 aa, Artificial Sequence
  source: /note="Description of Artificial Sequence: Synthetic peptide"
DRLQDGNSWSDAFDV

SEQ ID NO: 1284 - protein, 9 aa, Artificial Sequence
  source: /note="Description of Artificial Sequence: Synthetic peptide"
GDSVLSNSD

SEQ ID NO: 1285 - protein, 7 aa, Artificial Sequence
  source: /note="Description of Artificial Sequence: Synthetic peptide"
YHRSTWY

SEQ ID NO: 1286 - protein, 15 aa, Artificial Sequence
  source: /note="Description of Artificial Sequence: Synthetic peptide"
DRLQDGNSWSDAFDV

SEQ ID NO: 1287 - protein, 10 aa, Artificial Sequence
  source: /note="Description of Artificial Sequence: Synthetic peptide"
GDSVLSNSDT

SEQ ID NO: 1288 - protein, 9 aa, Artificial Sequence
  source: /note="Description of Artificial Sequence: Synthetic peptide"
TYHRSTWYD

SEQ ID NO: 1289 - protein, 17 aa, Artificial Sequence
  source: /note="Description of Artificial Sequence: Synthetic peptide"
ARDRLQDGNSWSDAFDV

SEQ ID NO: 1290 - protein, 12 aa, Artificial Sequence
  source: /note="Description of Artificial Sequence: Synthetic peptide"
GDSVLSNSDTWN

SEQ ID NO: 1291 - protein, 18 aa, Artificial Sequence
  source: /note="Description of Artificial Sequence: Synthetic peptide"
RTYHRSTWYDDYASSVRG

SEQ ID NO: 1292 - protein, 15 aa, Artificial Sequence
  source: /note="Description of Artificial Sequence: Synthetic peptide"
DRLQDGNSWSDAFDV

SEQ ID NO: 1293 - protein, 127 aa, Artificial Sequence
  source: /note="Description of Artificial Sequence: Synthetic polypeptide"
EVQLQQSGPGLVKPSQTLSLTCAISGDSVLSNSDTWNWIRQSPSRGLEWLGRTYHRSTWYDDYASSVRGRVSINVDTSKNQYSLQLNAVTPEDTGVYYCARDRLQDGNSWSDAFDVWGQGTMVTVSS

SEQ ID NO: 1294 - protein, 14 aa, Artificial Sequence
  source: /note="Description of Artificial Sequence: Synthetic peptide"
TGSSSDIGGFNYVS

SEQ ID NO: 1295 - protein, 7 aa, Artificial Sequence
  source: /note="Description of Artificial Sequence: Synthetic peptide"
EVTNRPS

SEQ ID NO: 1296 - protein, 11 aa, Artificial Sequence
  source: /note="Description of Artificial Sequence: Synthetic peptide"
SSYASGSPLYV

SEQ ID NO: 1297 - protein, 10 aa, Artificial Sequence
  source: /note="Description of Artificial Sequence: Synthetic peptide"
SSSDIGGFNY

SEQ ID NO: 1298 - protein, 3 aa, Artificial Sequence
  source: /note="Description of Artificial Sequence: Synthetic peptide"
EVT

SEQ ID NO: 1299 - protein, 8 aa, Artificial Sequence
  source: /note="Description of Artificial Sequence: Synthetic peptide"
YASGSPLY

SEQ ID NO: 1300 - protein, 9 aa, Artificial Sequence
  source: /note="Description of Artificial Sequence: Synthetic peptide"
SSDIGGFNY

SEQ ID NO: 1301 - protein, 3 aa, Artificial Sequence
  source: /note="Description of Artificial Sequence: Synthetic peptide"
EVT

SEQ ID NO: 1302 - protein, 11 aa, Artificial Sequence
  source: /note="Description of Artificial Sequence: Synthetic peptide"
SSYASGSPLYV

SEQ ID NO: 1303 - protein, 14 aa, Artificial Sequence
  source: /note="Description of Artificial Sequence: Synthetic peptide"
TGSSSDIGGFNYVS

SEQ ID NO: 1304 - protein, 7 aa, Artificial Sequence
  source: /note="Description of Artificial Sequence: Synthetic peptide"
EVTNRPS

SEQ ID NO: 1305 - protein, 11 aa, Artificial Sequence
  source: /note="Description of Artificial Sequence: Synthetic peptide"
SSYASGSPLYV

SEQ ID NO: 1306 - protein, 111 aa, Artificial Sequence
  source: /note="Description of Artificial Sequence: Synthetic polypeptide"
QSALTQPASVSGSPGQSITISCTGSSSDIGGFNYVSWYQQHAGEAPKLMIYEVTNRPSGVSDRFSGSKSDNTASLTISGLQAEDEADYYCSSYASGSPLYVFGTGTKVTVL

SEQ ID NO: 1307 - protein, 253 aa, Artificial Sequence
  source: /note="Description of Artificial Sequence: Synthetic polypeptide"
EVQLQQSGPGLVKPSQTLSLTCAISGDSVLSNSDTWNWIRQSPSRGLEWLGRTYHRSTWYDDYASSVRGRVSINVDTSKNQYSLQLNAVTPEDTGVYYCARDRLQDGNSWSDAFDVWGQGTMVTVSSGGGGSGGGGSGGGGSQSALTQPASVSGSPGQSITISCTGSSSDIGGFNYVSWYQQHAGEAPKLMIYEVTNRPSGVSDRFSGSKSDNTASLTISGLQAEDEADYYCSSYASGSPLYVFGTGTKVTVL

SEQ ID NO: 1308 - protein, 7 aa, Artificial Sequence
  source: /note="Description of Artificial Sequence: Synthetic peptide"
SNSDTWN

SEQ ID NO: 1309 - protein, 18 aa, Artificial Sequence
  source: /note="Description of Artificial Sequence: Synthetic peptide"
RTYHRSTWYDDYASSVRG

SEQ ID NO: 1310 - protein, 15 aa, Artificial Sequence
  source: /note="Description of Artificial Sequence: Synthetic peptide"
DRLQDGNSWSDAFDV

SEQ ID NO: 1311 - protein, 9 aa, Artificial Sequence
  source: /note="Description of Artificial Sequence: Synthetic peptide"
GDSVLSNSD

SEQ ID NO: 1312 - protein, 7 aa, Artificial Sequence
  source: /note="Description of Artificial Sequence: Synthetic peptide"
YHRSTWY

SEQ ID NO: 1313 - protein, 15 aa, Artificial Sequence
  source: /note="Description of Artificial Sequence: Synthetic peptide"
DRLQDGNSWSDAFDV

SEQ ID NO: 1314 - protein, 10 aa, Artificial Sequence
  source: /note="Description of Artificial Sequence: Synthetic peptide"
GDSVLSNSDT

SEQ ID NO: 1315 - protein, 9 aa, Artificial Sequence
  source: /note="Description of Artificial Sequence: Synthetic peptide"
TYHRSTWYD

SEQ ID NO: 1316 - protein, 17 aa, Artificial Sequence
  source: /note="Description of Artificial Sequence: Synthetic peptide"
ARDRLQDGNSWSDAFDV

SEQ ID NO: 1317 - protein, 12 aa, Artificial Sequence
  source: /note="Description of Artificial Sequence: Synthetic peptide"
GDSVLSNSDTWN

SEQ ID NO: 1318 - protein, 18 aa, Artificial Sequence
  source: /note="Description of Artificial Sequence: Synthetic peptide"
RTYHRSTWYDDYASSVRG

SEQ ID NO: 1319 - protein, 15 aa, Artificial Sequence
  source: /note="Description of Artificial Sequence: Synthetic peptide"
DRLQDGNSWSDAFDV

SEQ ID NO: 1320 - protein, 127 aa, Artificial Sequence; identical to SEQ ID NO: 1293
  source: /note="Description of Artificial Sequence: Synthetic polypeptide"

SEQ ID NO: 1321 - protein, 14 aa, Artificial Sequence
  source: /note="Description of Artificial Sequence: Synthetic peptide"
TGTSSDIGGYNYVS

SEQ ID NO: 1322 - protein, 7 aa, Artificial Sequence
  source: /note="Description of Artificial Sequence: Synthetic peptide"
EVSNRPS

SEQ ID NO: 1323 - protein, 11 aa, Artificial Sequence
  source: /note="Description of Artificial Sequence: Synthetic peptide"
SSYTSSSTLYV

SEQ ID NO: 1324 - protein, 10 aa, Artificial Sequence
  source: /note="Description of Artificial Sequence: Synthetic peptide"
TSSDIGGYNY

SEQ ID NO: 1325 - protein, 3 aa, Artificial Sequence
  source: /note="Description of Artificial Sequence: Synthetic peptide"
EVS

SEQ ID NO: 1326 - protein, 8 aa, Artificial Sequence
  source: /note="Description of Artificial Sequence: Synthetic peptide"
YTSSSTLY

SEQ ID NO: 1327 - protein, 9 aa, Artificial Sequence
  source: /note="Description of Artificial Sequence: Synthetic peptide"
SSDIGGYNY

SEQ ID NO: 1328 - protein, 3 aa, Artificial Sequence
  source: /note="Description of Artificial Sequence: Synthetic peptide"
EVS

SEQ ID NO: 1329 - protein, 11 aa, Artificial Sequence
  source: /note="Description of Artificial Sequence: Synthetic peptide"
SSYTSSSTLYV

SEQ ID NO: 1330 - protein, 14 aa, Artificial Sequence
  source: /note="Description of Artificial Sequence: Synthetic peptide"
TGTSSDIGGYNYVS

SEQ ID NO: 1331 - protein, 7 aa, Artificial Sequence
  source: /note="Description of Artificial Sequence: Synthetic peptide"
EVSNRPS

SEQ ID NO: 1332 - protein, 11 aa, Artificial Sequence
  source: /note="Description of Artificial Sequence: Synthetic peptide"
SSYTSSSTLYV

SEQ ID NO: 1333 - protein, 111 aa, Artificial Sequence
  source: /note="Description of Artificial Sequence: Synthetic polypeptide"
QSALTQPASVSGSPGQSITFSCTGTSSDIGGYNYVSWYQQHPGKAPKLMIYEVSNRPSGVSNRFSGTKSGNTASLTISGLQAEDEADYYCSSYTSSSTLYVFGTGTKLTVL

SEQ ID NO: 1334 - protein, 253 aa, Artificial Sequence
  source: /note="Description of Artificial Sequence: Synthetic polypeptide"
EVQLQQSGPGLVKPSQTLSLTCAISGDSVLSNSDTWNWIRQSPSRGLEWLGRTYHRSTWYDDYASSVRGRVSINVDTSKNQYSLQLNAVTPEDTGVYYCARDRLQDGNSWSDAFDVWGQGTMVTVSSGGGGSGGGGSGSGGSQSALTQPASVSGSPGQSITFSCTGTSSDIGGYNYVSWYQQHPGKAPKLMIYEVSNRPSGVSNRFSGTKSGNTASLTISGLQAEDEADYYCSSYTSSSTLYVFGTGTKLTVL

SEQ ID NO: 1335 - protein, 7 aa, Artificial Sequence
  source: /note="Description of Artificial Sequence: Synthetic peptide"
SNSDTWN

SEQ ID NO: 1336 - protein, 18 aa, Artificial Sequence
  source: /note="Description of Artificial Sequence: Synthetic peptide"
RTYHRSTWYDDYASSVRG

SEQ ID NO: 1337 - protein, 15 aa, Artificial Sequence
  source: /note="Description of Artificial Sequence: Synthetic peptide"
DRLQDGNSWSDAFDV

SEQ ID NO: 1338 - protein, 9 aa, Artificial Sequence
  source: /note="Description of Artificial Sequence: Synthetic peptide"
GDSVLSNSD

SEQ ID NO: 1339 - protein, 7 aa, Artificial Sequence
  source: /note="Description of Artificial Sequence: Synthetic peptide"
YHRSTWY

SEQ ID NO: 1340 - protein, 15 aa, Artificial Sequence
  source: /note="Description of Artificial Sequence: Synthetic peptide"
DRLQDGNSWSDAFDV

SEQ ID NO: 1341 - protein, 10 aa, Artificial Sequence
  source: /note="Description of Artificial Sequence: Synthetic peptide"
GDSVLSNSDT

SEQ ID NO: 1342 - protein, 9 aa, Artificial Sequence
  source: /note="Description of Artificial Sequence: Synthetic peptide"
TYHRSTWYD

SEQ ID NO: 1343 - protein, 17 aa, Artificial Sequence
  source: /note="Description of Artificial Sequence: Synthetic peptide"
ARDRLQDGNSWSDAFDV

SEQ ID NO: 1344 - protein, 12 aa, Artificial Sequence
  source: /note="Description of Artificial Sequence: Synthetic peptide"
GDSVLSNSDTWN

SEQ ID NO: 1345 - protein, 18 aa, Artificial Sequence
  source: /note="Description of Artificial Sequence: Synthetic peptide"
RTYHRSTWYDDYASSVRG

SEQ ID NO: 1346 - protein, 15 aa, Artificial Sequence
  source: /note="Description of Artificial Sequence: Synthetic peptide"
DRLQDGNSWSDAFDV

SEQ ID NO: 1347 - protein, 127 aa, Artificial Sequence
  source: /note="Description of Artificial Sequence: Synthetic polypeptide"
QVQLQESGPGLVKPSQTLSLTCAISGDSVLSNSDTWNWIRQSPSRGLEWLGRTYHRSTWYDDYASSVRGRVSINVDTSKNQYSLQLNAVTPEDTGVYYCARDRLQDGNSWSDAFDVWGQGTMVTVSS

SEQ ID NO: 1348 - protein, 14 aa, Artificial Sequence
  source: /note="Description of Artificial Sequence: Synthetic peptide"
TGTSSDVGGYNYVS

SEQ ID NO: 1349 - protein, 7 aa, Artificial Sequence
  source: /note="Description of Artificial Sequence: Synthetic peptide"
EVSNRPS

SEQ ID NO: 1350 - protein, 11 aa, Artificial Sequence
  source: /note="Description of Artificial Sequence: Synthetic peptide"
SSYTSSSTLYV

SEQ ID NO: 1351 - protein, 10 aa, Artificial Sequence
  source: /note="Description of Artificial Sequence: Synthetic peptide"
TSSDVGGYNY

SEQ ID NO: 1352 - protein, 3 aa, Artificial Sequence
  source: /note="Description of Artificial Sequence: Synthetic peptide"
EVS

SEQ ID NO: 1353 - protein, 8 aa, Artificial Sequence
  source: /note="Description of Artificial Sequence: Synthetic peptide"
YTSSSTLY

SEQ ID NO: 1354 - protein, 9 aa, Artificial Sequence
  source: /note="Description of Artificial Sequence: Synthetic peptide"
SSDVGGYNY

SEQ ID NO: 1355 - protein, 3 aa, Artificial Sequence
  source: /note="Description of Artificial Sequence: Synthetic peptide"
EVS

SEQ ID NO: 1356 - protein, 11 aa, Artificial Sequence
  source: /note="Description of Artificial Sequence: Synthetic peptide"
SSYTSSSTLYV

SEQ ID NO: 1357 - protein, 14 aa, Artificial Sequence
  source: /note="Description of Artificial Sequence: Synthetic peptide"
TGTSSDVGGYNYVS

SEQ ID NO: 1358 - protein, 7 aa, Artificial Sequence
  source: /note="Description of Artificial Sequence: Synthetic peptide"
EVSNRPS

SEQ ID NO: 1359 - protein, 11 aa, Artificial Sequence
  source: /note="Description of Artificial Sequence: Synthetic peptide"
SSYTSSSTLYV

SEQ ID NO: 1360 - protein, 111 aa, Artificial Sequence
  source: /note="Description of Artificial Sequence: Synthetic polypeptide"
QSALTQPASVSGSPGQSITISCTGTSSDVGGYNYVSWYQQHPGKAPKLMIYEVSNRPSGVSNRFSGSKSGNTASLTISGLQAEDEADYYCSSYTSSSTLYVFGTGTKVTVL

SEQ ID NO: 1361 - protein, 253 aa, Artificial Sequence
  source: /note="Description of Artificial Sequence: Synthetic polypeptide"
QVQLQESGPGLVKPSQTLSLTCAISGDSVLSNSDTWNWIRQSPSRGLEWLGRTYHRSTWYDDYASSVRGRVSINVDTSKNQYSLQLNAVTPEDTGVYYCARDRLQDGNSWSDAFDVWGQGTMVTVSSGGGGSGGGGSGSGGSQSALTQPASVSGSPGQSITISCTGTSSDVGGYNYVSWYQQHPGKAPKLMIYEVSNRPSGVSNRFSGSKSGNTASLTISGLQAEDEADYYCSSYTSSSTLYVFGTGTKVTVL

SEQ ID NO: 1362 - protein, 7 aa, Artificial Sequence
  source: /note="Description of Artificial Sequence: Synthetic peptide"
SNSDTWN

SEQ ID NO: 1363 - protein, 18 aa, Artificial Sequence
  source: /note="Description of Artificial Sequence: Synthetic peptide"
RTYHRSTWYDDYASSVRG

SEQ ID NO: 1364 - protein, 15 aa, Artificial Sequence
  source: /note="Description of Artificial Sequence: Synthetic peptide"
DRLQDGNSWSDAFDV

SEQ ID NO: 1365 - protein, 9 aa, Artificial Sequence
  source: /note="Description of Artificial Sequence: Synthetic peptide"
GDSVLSNSD

SEQ ID NO: 1366 - protein, 7 aa, Artificial Sequence
  source: /note="Description of Artificial Sequence: Synthetic peptide"
YHRSTWY

SEQ ID NO: 1367 - protein, 15 aa, Artificial Sequence
  source: /note="Description of Artificial Sequence: Synthetic peptide"
DRLQDGNSWSDAFDV

SEQ ID NO: 1368 - protein, 10 aa, Artificial Sequence
  source: /note="Description of Artificial Sequence: Synthetic peptide"
GDSVLSNSDT

SEQ ID NO: 1369 - protein, 9 aa, Artificial Sequence
  source: /note="Description of Artificial Sequence: Synthetic peptide"
TYHRSTWYD

SEQ ID NO: 1370 - protein, 17 aa, Artificial Sequence
  source: /note="Description of Artificial Sequence: Synthetic peptide"
ARDRLQDGNSWSDAFDV

SEQ ID NO: 1371 - protein, 12 aa, Artificial Sequence
  source: /note="Description of Artificial Sequence: Synthetic peptide"
GDSVLSNSDTWN

SEQ ID NO: 1372 - protein, 18 aa, Artificial Sequence
  source: /note="Description of Artificial Sequence: Synthetic peptide"
RTYHRSTWYDDYASSVRG

SEQ ID NO: 1373 - protein, 15 aa, Artificial Sequence
  source: /note="Description of Artificial Sequence: Synthetic peptide"
DRLQDGNSWSDAFDV

SEQ ID NO: 1374 - protein, 127 aa, Artificial Sequence; identical to SEQ ID NO: 1293
  source: /note="Description of Artificial Sequence: Synthetic polypeptide"

SEQ ID NO: 1375 - protein, 14 aa, Artificial Sequence
  source: /note="Description of Artificial Sequence: Synthetic peptide"
TGTSSDVGGYNYVS

SEQ ID NO: 1376 - protein, 7 aa, Artificial Sequence
  source: /note="Description of Artificial Sequence: Synthetic peptide"
DVSNRPS

SEQ ID NO: 1377 - protein, 11 aa, Artificial Sequence
  source: /note="Description of Artificial Sequence: Synthetic peptide"
SSYTSSSTLYV

SEQ ID NO: 1378 - protein, 10 aa, Artificial Sequence
  source: /note="Description of Artificial Sequence: Synthetic peptide"
TSSDVGGYNY

SEQ ID NO: 1379 - protein, 3 aa, Artificial Sequence
  source: /note="Description of Artificial Sequence: Synthetic peptide"
DVS

SEQ ID NO: 1380 - protein, 8 aa, Artificial Sequence
  source: /note="Description of Artificial Sequence: Synthetic peptide"
YTSSSTLY

SEQ ID NO: 1381 - protein, 9 aa, Artificial Sequence
  source: /note="Description of Artificial Sequence: Synthetic peptide"
SSDVGGYNY

SEQ ID NO: 1382 - protein, 3 aa, Artificial Sequence
  source: /note="Description of Artificial Sequence: Synthetic peptide"
DVS

SEQ ID NO: 1383 - protein, 11 aa, Artificial Sequence
  source: /note="Description of Artificial Sequence: Synthetic peptide"
SSYTSSSTLYV

SEQ ID NO: 1384 - protein, 14 aa, Artificial Sequence
  source: /note="Description of Artificial Sequence: Synthetic peptide"
TGTSSDVGGYNYVS

SEQ ID NO: 1385 - protein, 7 aa, Artificial Sequence
  source: /note="Description of Artificial Sequence: Synthetic peptide"
DVSNRPS

SEQ ID NO: 1386 - protein, 11 aa, Artificial Sequence
  source: /note="Description of Artificial Sequence: Synthetic peptide"
SSYTSSSTLYV

SEQ ID NO: 1387 - protein, 111 aa, Artificial Sequence
  source: /note="Description of Artificial Sequence: Synthetic polypeptide"
QSALTQPASVSGSPGQSITISCTGTSSDVGGYNYVSWYQQHPGKAPKLMIYDVSNRPSGVSNRFSGSKSGNTASLTISGLQAEDEADYYCSSYTSSSTLYVFGTGTKVTVL

SEQ ID NO: 1388 - protein, 253 aa, Artificial Sequence
  source: /note="Description of Artificial Sequence: Synthetic polypeptide"
EVQLQQSGPGLVKPSQTLSLTCAISGDSVLSNSDTWNWIRQSPSRGLEWLGRTYHRSTWYDDYASSVRGRVSINVDTSKNQYSLQLNAVTPEDTGVYYCARDRLQDGNSWSDAFDVWGQGTMVTVSSGGGGSGGGGSGGGGSQSALTQPASVSGSPGQSITISCTGTSSDVGGYNYVSWYQQHPGKAPKLMIYDVSNRPSGVSNRFSGSKSGNTASLTISGLQAEDEADYYCSSYTSSSTLYVFGTGTKVTVL

SEQ ID NO: 1389 - protein, 7 aa, Artificial Sequence
  source: /note="Description of Artificial Sequence: Synthetic peptide"
SNSDTWN

SEQ ID NO: 1390 - protein, 18 aa, Artificial Sequence
  source: /note="Description of Artificial Sequence: Synthetic peptide"
RTYHRSTWYDDYASSVRG

SEQ ID NO: 1391 - protein, 15 aa, Artificial Sequence
  source: /note="Description of Artificial Sequence: Synthetic peptide"
DRLQDGNSWSDAFDV

SEQ ID NO: 1392 - protein, 9 aa, Artificial Sequence
  source: /note="Description of Artificial Sequence: Synthetic peptide"
GDSVLSNSD

SEQ ID NO: 1393 - protein, 7 aa, Artificial Sequence
  source: /note="Description of Artificial Sequence: Synthetic peptide"
YHRSTWY

SEQ ID NO: 1394 - protein, 15 aa, Artificial Sequence
  source: /note="Description of Artificial Sequence: Synthetic peptide"
DRLQDGNSWSDAFDV

SEQ ID NO: 1395 - protein, 10 aa, Artificial Sequence
  source: /note="Description of Artificial Sequence: Synthetic peptide"
GDSVLSNSDT

SEQ ID NO: 1396 - protein, 9 aa, Artificial Sequence
  source: /note="Description of Artificial Sequence: Synthetic peptide"
TYHRSTWYD

SEQ ID NO: 1397 - protein, 17 aa, Artificial Sequence
  source: /note="Description of Artificial Sequence: Synthetic peptide"
ARDRLQDGNSWSDAFDV

SEQ ID NO: 1398 - protein, 12 aa, Artificial Sequence
  source: /note="Description of Artificial Sequence: Synthetic peptide"
GDSVLSNSDTWN

SEQ ID NO: 1399 - protein, 18 aa, Artificial Sequence
  source: /note="Description of Artificial Sequence: Synthetic peptide"
RTYHRSTWYDDYASSVRG

SEQ ID NO: 1400 - protein, 15 aa, Artificial Sequence
  source: /note="Description of Artificial Sequence: Synthetic peptide"
DRLQDGNSWSDAFDV

SEQ ID NO: 1401 - protein, 127 aa, Artificial Sequence; identical to SEQ ID NO: 1293
  source: /note="Description of Artificial Sequence: Synthetic polypeptide"

SEQ ID NO: 1402 - protein, 14 aa, Artificial Sequence
  source: /note="Description of Artificial Sequence: Synthetic peptide"
TGTSSDVGGYNYVS

SEQ ID NO: 1403 - protein, 7 aa, Artificial Sequence
  source: /note="Description of Artificial Sequence: Synthetic peptide"
EVSNRPS

SEQ ID NO: 1404 - protein, 11 aa, Artificial Sequence
  source: /note="Description of Artificial Sequence: Synthetic peptide"
SSYTSSSTLYI

SEQ ID NO: 1405 - protein, 10 aa, Artificial Sequence
  source: /note="Description of Artificial Sequence: Synthetic peptide"
TSSDVGGYNY

SEQ ID NO: 1406 - protein, 3 aa, Artificial Sequence
  source: /note="Description of Artificial Sequence: Synthetic peptide"
EVS

SEQ ID NO: 1407 - protein, 8 aa, Artificial Sequence
  source: /note="Description of Artificial Sequence: Synthetic peptide"
YTSSSTLY

SEQ ID NO: 1408 - protein, 9 aa, Artificial Sequence
  source: /note="Description of Artificial Sequence: Synthetic peptide"
SSDVGGYNY

SEQ ID NO: 1409 - protein, 3 aa, Artificial Sequence
  source: /note="Description of Artificial Sequence: Synthetic peptide"
EVS

SEQ ID NO: 1410 - protein, 11 aa, Artificial Sequence
  source: /note="Description of Artificial Sequence: Synthetic peptide"
SSYTSSSTLYI

SEQ ID NO: 1411 - protein, 14 aa, Artificial Sequence
  source: /note="Description of Artificial Sequence: Synthetic peptide"
TGTSSDVGGYNYVS

SEQ ID NO: 1412 - protein, 7 aa, Artificial Sequence
  source: /note="Description of Artificial Sequence: Synthetic peptide"
EVSNRPS

SEQ ID NO: 1413 - protein, 11 aa, Artificial Sequence
  source: /note="Description of Artificial Sequence: Synthetic peptide"
SSYTSSSTLYI

SEQ ID NO: 1414 - protein, 111 aa, Artificial Sequence
  source: /note="Description of Artificial Sequence: Synthetic polypeptide"
QSALTQPASVSGSPGQSITISCTGTSSDVGGYNYVSWYQQHPGKAPKLMIYEVSNRPSGVSNRFSGSKSGNTASLTISGLQAEDEADYYCSSYTSSSTLYIFGTGTKVTVL

SEQ ID NO: 1415 - protein, 253 aa, Artificial Sequence
  source: /note="Description of Artificial Sequence: Synthetic polypeptide"
EVQLQQSGPGLVKPSQTLSLTCAISGDSVLSNSDTWNWIRQSPSRGLEWLGRTYHRSTWYDDYASSVRGRVSINVDTSKNQYSLQLNAVTPEDTGVYYCARDRLQDGNSWSDAFDVWGQGTMVTVSSGGGGSGGGGSGGGGSQSALTQPASVSGSPGQSITISCTGTSSDVGGYNYVSWYQQHPGKAPKLMIYEVSNRPSGVSNRFSGSKSGNTASLTISGLQAEDEADYYCSSYTSSSTLYIFGTGTKVTVL

SEQ ID NO: 1416 - protein, 719 aa, Artificial Sequence
  source: /note="Description of Artificial Sequence: Synthetic polypeptide"
EVQLVESGGGLVQPGGSLRLSCAASGFTFSTYGMSWVRQAPGKGLEWVSSIFYTGSSTYYADSVKGRFTISRDNSKNTLYLQMNSLRAEDTAVYYCARIGYAGDSKYAIWGQGTLVTVSSASTKGPSVFPLAPSSKSTSGGTAALGCLVKDYFPEPVTVSWNSGALTSGVHTFPAVLQSSGLYSLSSVVTVPSSSLGTQTYICNVNHKPSNTKVDKRVEPKSCDKTHTCPPCPAPEAAGGPSVFLFPPKPKDTLMISRTPEVTCVVVDVKHEDPEVKFNWYVDGVEVHNAKTKPREEQYNSTYRVVSVLTVLHQDWLNGKEYKCKVSNKALAAPIEKTISKAKGQPREPQVYTLPPSREEMTKNQVSLTCLVKGFYPSDIAVEWESNGQPENNYKTTPPVLDSDGSFFLYSKLTVDKSRWQQGNVFSCSVMHEALHNHYTQKSLSLSPGGGGGSGGGGSGGGGSGGGGSEVKLVESGGDLVQPGDSLTLSCVASGFTFSKQGMHWIRQAPKKGLEWIAMIYYDSSKMYYADTVKGRFTISRDNSKNTLYLEMNSLRSEDTAMYYCASFWWDLDFDHWGQGVMVTVSSGGGGSGGGGSGGGGSGGGGSDILVTQTPVSLPVSLGGHVSISCRSSQSLVRSEGTTYFNWYLQKPGQSPQLLIYRVSNRFSGVPDRFSGSGSGTDFTLKISRVEPEDLGVYYCLQSSHFPWTFGGGTKLELK

SEQ ID NO: 1417 - protein, 723 aa, Artificial Sequence
  source: /note="Description of Artificial Sequence: Synthetic polypeptide"
EVQLVESGGGLVQPGGSLRLSCAASGFTFSTYGMSWVRQAPGKGLEWVSSIFYTGSSTYYADSVKGRFTISRDNSKNTLYLQMNSLRAEDTAVYYCARIGYAGDSKYAIWGQGTLVTVSSASTKGPSVFPLAPSSKSTSGGTAALGCLVKDYFPEPVTVSWNSGALTSGVHTFPAVLQSSGLYSLSSVVTVPSSSLGTQTYICNVNHKPSNTKVDKRVEPKSCDKTHTCPPCPAPEAAGGPSVFLFPPKPKDTLMISRTPEVTCVVVDVKHEDPEVKFNWYVDGVEVHNAKTKPREEQYNSTYRVVSVLTVLHQDWLNGKEYKCKVSNKALAAPIEKTISKAKGQPREPQVYTLPPSREEMTKNQVSLTCLVKGFYPSDIAVEWESNGQPENNYKTTPPVLDSDGSFFLYSKLTVDKSRWQQGNVFSCSVMHEALHNHYTQKSLSLSPGGGGGSGGGGSGGGGSGGGGSEVQLVESGGGLVQPGGSLKLSCAASGFTFNKYAMNWVRQAPGKCLEWVARIRSKYNNYATYYADSVKDRFTISRDDSKNTAYLQMNNLKTEDTAVYYCVRHGNFGNSYISYWAYWGQGTLVTVSSGGGGSGGGGSGGGGSGGGGSQTVVTQEPSLTVSPGGTVTLTCGSSTGAVTSGNYPNWVQQKPGQAPRGLIGGTKFLAPGTPARFSGSLLGGKAALTLSGVQPEDEAEYYCVLWYSNRWVFGCGTKLTVL
